(19) United States
(12) Patent Application Publication
(10) Pub. No.: US 2014/0287471 A1
(43) Pub. Date: Sep. 25, 2014

(54) VARIANT CBH I POLYPEPTIDES WITH REDUCED PRODUCT INHIBITION

(71) Applicant: BP CORPORATION NORTN AMERICA INC., Houston, TX (US)

(72) Inventors: Sarah Richardson Hanson, San Marcos, CA (US); Justin T. Stege, San Diego, CA (US); Cecilia Cheng, San Diego, CA (US); Peter Luginbuhl, San Diego, CA (US)

(73) Assignee: Bp Corporation North America Inc., Houston, TX (US)

(21) Appl. No.: 14/349,253

(22) PCT Filed: Oct. 5, 2012
(86) PCT No.: PCT/US12/59005

§ 371 Date: Apr. 2, 2014

Related U.S. Application Data
(60) Provisional application No. 61/622,971, filed on Apr. 11, 2012.
(60) Provisional application No. 61/544,256, filed on Oct. 6, 2011.

(51) Int. Cl. C12N 9/24

(52) U.S. Cl. CPC C12N 9/2402
USPC 435/100; 536/23.2; 536/55.3; 435/209; 435/105; 435/161; 435/320.1; 435/254.3; 435/254.5; 435/254.9; 435/254.11; 435/254.6; 435/254.7; 435/254.21; 435/254.22; 435/254.23; 435/254.2; 435/252.33; 435/252.31; 435/252.34; 435/252.35; 435/252.3

(57) ABSTRACT

The present disclosure relates to variant CBH I polypeptides that have reduced product inhibition, and compositions, e.g., cellulase compositions, comprising variant CBH I polypeptides. The variant CBH I polypeptides and related compositions can be used in variety of agricultural and industrial applications. The present disclosure further relates to nucleic acids encoding variant CBH I polypeptides and host cells that recombinantly express the variant CBH I polypeptides.

### BACKGROUND

[0001] Cellulose is an unbranched polymer of glucose linked by β(1→4)-glycosidic bonds. Cellulose chains can interact with each other via hydrogen bonding to form a crystalline solid of high mechanical strength and chemical stability. The cellulose chains are depolymerized into glucose and short oligosaccharides before organisms, such as the fermenting microbes used in ethanol production, can use them as metabolic fuel. Cellulase enzymes catalyze the hydrolysis of the cellulose (hydrolysis of β-1,4-D-glucan linkages) in the biomass into products such as glucose, cellobiose, and other cellooligosaccharides. Cellulase is a generic term denoting a multienzyme mixture comprising exo-acting cellobiohydrolases (CBHs), endoglucanases (EGs) and β-glucosidases (BGs) that can be produced by a number of plants and microorganisms. Enzymes in the cellulase of Trichoderma reesei include CBH I (more generally, Cel7A), CBH2 (Cel6A), EG1 (Cel7B), EG2 (Cel5), EG3 (Cel12), EG4 (Cel61A), EG5 (Cel45A), EG6 (Cel74A), Cip1, Cip2, β-glucosidases (including, e.g., Cel3A), acetyl xylan esterase, β-mannanase, and swollenin.

[0002] Cellulase enzymes work synergistically to hydrolyze cellulose to glucose. CBH I and CBH II act on opposing ends of cellulose chains (Barr et al., 1996, Biochemistry 35:586-92), while the endoglucanases act at internal locations in the cellulose. The primary product of these enzymes is cellobiose, which is further hydrolyzed to glucose by one or more β-glucosidases.

[0003] The cellobiohydrolases are subject to inhibition by their direct product, cellobiose, which results in a slowing down of saccharification reactions as product accumulates. There is a need for new and improved cellobiohyrolases with improved productivity that maintain their reaction rates during the course of a saccharification reaction, for use in the conversion of cellulose into fermentable sugars and for related fields of cellulosic material processing such as pulp and paper, textiles and animal feeds.

### SUMMARY

[0004] The present disclosure relates to variant CBH I polypeptides. Most naturally occurring CBH I polypeptides have arginines at positions corresponding to R268 and R411 of T. reesei CBH I (SEQ ID NO:2). The variant CBH I polypeptides of the present disclosure include a substitution at either or both positions resulting in a reduction or decrease in product (e.g., cellobiose) inhibition. Such variants are sometimes referred to herein as “product tolerant.” In some instances, the variants have an increased specific activity towards a CBH I substrate.

[0005] Accordingly, the present invention provides polypeptides (variant CBH I polypeptides) in which the CBH I catalytic domain has been engineered to incorporate an amino acid substitution that results in increased tolerance to cellobiose, increased specific activity, or both. The variant CBH I polypeptides of the disclosure minimally contain at least a CBH I catalytic domain, comprising (a) a substitution at the amino acid position corresponding to R268 of T. reesei CBH I (“R268 substitution”); (b) a substitution at the amino acid position corresponding to R411 of T. reesei CBH I (“R411 substitution”); or (c) both an R268 substitution and an R411 substitution. The amino acid positions of exemplary CBH I polypeptides into which R268 and/or R411 substitutions can be introduced are shown in Table 1, and the amino acid positions corresponding to R268 and/or R411 in these exemplary CBH I polypeptides are shown in Table 2.

[0006] The polypeptides of the disclosure show at least 2-fold, at least 5-fold, at least 10-fold, at least 15-fold, at least 20-fold, at least 25-fold, at least 50-fold, at least 100-fold, at least 150-fold, at least 200-fold, at least 250-fold, at least 500-fold or at least 700-fold greater tolerance to cellobiose, and in some cases up to 750-fold or up to 1,000-fold greater tolerance to cellobiose, a wild type CBH I which does not have a substitution at the amino acid corresponding to R268 or the amino acid position corresponding to R411. Product tolerance can suitably be determined by assaying the IC₅₀, the half maximal inhibitory concentration, of cellobiose towards the polypeptide.

[0007] In certain aspects, the polypeptides of the disclosure are characterized by an IC₅₀ of cellobiose is at least 0.1 mM, at least 0.5 mM, at least 1 mM, at least 2 mM, at least 3 mM, at least 5 mM, at least 7 mM, at least 10 mM, at least 12 mM, at least 15 mM, at least 20 mM, at least 25 mM or at least 30 mM.

[0008] In certain embodiments, a polypeptide of the disclosure comprises an R268 substitution. The R268 substitution preferably results in an IC₅₀ of cellobiose that is at least 2-fold, at least 5-fold, at least 7.5-fold or at least 10-fold the IC₅₀ of cellobiose on the reference CBH I (e.g., a CBH I without an R268 or R411 substitution). In certain embodiments, the R411 substitution results in an IC₅₀ of cellobiose of at least 0.1 mM, at least 0.25 mM, or at least 0.5 mM. Exemplary R268 substituents are (a) histidine or lysine; (b) isoleucine, leucine, valine, phenylalanine, tyrosine, asparagine, serine, threonine, cysteine, or glycine; (c) alanine, tryptophan, aspartate, glutamate, or proline; or (d) glutamine or methionine. R268 substitutions were generally found to increase the specific activity of CBH I, in some cases up to 4.4-fold (see Table 13).

[0009] In certain embodiments, a polypeptide of the disclosure comprises an R411 substitution. The R411 substitution preferably results in an IC₅₀ of cellobiose that is at least 10-fold, at least 15-fold, at least 20-fold, at least 25-fold, at least 50-fold, at least 100-fold or at least 140-fold the IC50 of cellobiose on the reference CBH I (e.g., a CBH I without an R268 or R411 substitution). In certain embodiments, the R411 substitution results in an IC50 of cellobiose of at least 1 mM, at least 2 mM, at least 3 mM, at least 4 mM, at least 5 mM, at least 6 mM, at least 7 mM or at least 8 mM. Exemplary R411 substituents are (a) alanine, aspartate, serine, cysteine, or proline; (b) valine, glutamate, histidine, lysine, threonine, glycine, methionine, or, optionally, glutamine; (c) leucine, phenylalanine, tryptophan, tyrosine, or asparagine; or (d) isoleucine. R411 substitutions were generally found to not impact or slightly decrease the specific activity of CBH I.

[0010] It was surprisingly discovered that introducing both R268 and R411 substitutions resulted in synergistic effects on CBH I product tolerance (see Table 12), without meaningfully affecting, and in several cases increasing, specific activity of the enzyme (see Table 13). Accordingly, introducing both R268 and R411 substitutions into a CBH I molecule is particularly beneficial.

[0011] The CBH I polypeptides the disclosure with both R268 and R411 substitutions preferably show a 100-fold to 1,000-fold improvement in tolerance to cellobiose, and a specific activity of 0.7-fold to 3-fold the specific activity, of a wild type CBH I which does not have either R268 or R411 substitutions. In some embodiments of the foregoing ranges, the improvement in cellobiose tolerance is at least 200- or 300-fold, and the specific activity is at least 1-fold or at least 1.5-fold the specific activity of said wild type CBH I.

[0012] In certain aspects, a CBH I polypeptide of the disclosure is any variant having the amino acid substitutions enumerated in Table 14, which shows 399 possible R268 and/or R411 amino acid substitutions (with a dash “-” indicating a wild type “R” residue). Thus, the variant can be characterized by a single R268 or R411 substitution or a double R268/R411 substitution. Variants with single R268 substitutions can be selected from variant nos. 281-299 in Table 14, and variants with single R411 substitutions can be selected from variant nos. 15, 35, 55, 75, 95, 115, 135, 155, 175, 215, 235, 255, 275, 314, 334, 354, 374, and 396 in Table 14. Variants with a double R268/R411 substitution can be selected from variant nos. 1-14, 16-34, 36-54, 56-74, 76-94, 96-114, 116-134, 136-154, 156-174, 176-194, 196-214, 216-234, 236-254, 256-74, 276-280, 300-313, 315-333, 335-353, 355-373, 375-393, and 395-399. In specific embodiments, the variant does not have the same substitutions as one or more of variants 1, 9, 15, 161, 169, 175, 281 and/or 289 of Table 14.

[0013] In certain embodiments, R268 and/or R411 substituents can include lysines and/or alanines. Accordingly, the present disclosure provides a variant CBH I polypeptide comprising a CBH I catalytic domain with one of the following amino acid substitutions or pairs of R268 and/or R411 substitutions: (a) R268K and R411K; (b) R268K and R411A; (c) R268A and R411K; (d) R268A and R411A; (e) R268A; (f) R268K; (g) R411A; and (h) R411K. In some embodiments, however, the amino acid sequence of the variant CBH I polypeptide does not comprise or consist of SEQ ID NO:299, SEQ ID NO:300, SEQ ID NO:301, or SEQ ID NO:302.

[0014] The variant CBHI polypeptides of the disclosure typically include a CD comprising an amino acid sequence having at least 50% sequence identity to a CD of a reference CBH I exemplified in Table 1. The CD portions of the CBH I polypeptides exemplified in Table 1 are delineated in Table 3. The variant CBH I polypeptides can have a cellulose binding domain (“CBD”) sequence in addition to the catalytic domain (“CD”) sequence. The CBD can be N- or C-terminal to the CD, and the CBD and CD are optionally connected via a linker sequence.

[0015] The variant CBH I polypeptides can be mature polypeptides or they may further comprise a signal sequence.

[0016] Additional embodiments of the variant CBH I polypeptides are provided in Section 1.1.

[0017] The variant CBH I polypeptides of the disclosure typically exhibit reduced product inhibition by cellobiose. In certain embodiments, the IC₅₀ of cellobiose towards a variant CBH I polypeptide of the disclosure is at least 1.2-fold, at least 1.5-fold, or at least 2-fold the IC₅₀ of cellobiose towards a reference CBH I lacking the R268 substitution and/or R411 substitution present in the variant. Additional embodiments of the product inhibition characteristics of the variant CBH I polypeptides are provided in Section 1.1.

[0018] The variant CBH I polypeptides of the disclosure typically retain some cellobiohydrolase activity. In certain embodiments, a variant CBH I polypeptide retains at least 50% the CBH I activity of a reference CBH I lacking the R268 substitution and/or R411 substitution present in the variant. Additional embodiments of cellobiohydrolase activity of the variant CBH I polypeptides are provided in Section 1.1.

[0019] The present disclosure further provides compositions (including cellulase compositions, e.g., whole cellulase compositions, and fermentation broths) comprising variant CBH I polypeptides. Additional embodiments of compositions comprising variant CBH I polypeptides are provided in Section 1.3. The variant CBH I polypeptides and compositions comprising them can be used, inter alia, in processes for saccharifying biomass. Additional details of saccharification reactions, and additional applications of the variant CBH I polypeptides, are provided in Section 1.4.

[0020] The present disclosure further provides nucleic acids (e.g., vectors) comprising nucleotide sequences encoding variant CBH I polypeptides as described herein, and recombinant cells engineered to express the variant CBH I polypeptides. The recombinant cell can be a prokaryotic (e.g., bacterial) or eukaryotic (e.g., yeast or filamentous fungal) cell. Further provided are methods of producing and optionally recovering the variant CBH I polypeptides. Additional embodiments of the recombinant expression system suitable for expression and production of the variant CBH I polypeptides are provided in Section 1.2.

### BRIEF DESCRIPTION OF THE FIGURES AND TABLES

[0021] FIG. 1A-1B: Cellobiose dose-response curves using a 4-MUL assay for a wild-type CBH I (BD29555; FIG. 1A) and a R268K/R411K variant CBH I (BD29555 with the substitutions R273K/R422K; FIG. 1B).

[0022] FIG. 2A-2B: The effect of cellobiose accumulation on the activity of wild-type CBH I and a R268K/R411K variant CBH I, based on percent conversion of glucan after 72 hours in the bagasse assay. FIG. 2A shows relative activity in the presence (+) and absence (−) of β-glucosidase (BG), where relative activity is normalized to wild type activity with BG (WT+=1). FIG. 2B shows tolerance to cellobiose as a function of the ratio of activity in the absence vs. presence of β-glucosidase (activity ratio=Activity−BG/Activity+BG).

[0023] FIG. 3: Cellobiose dose-response curves using PASC assay for a R268K/R411K variant CBH I polypeptide as compared to two wild type CBH I polypeptides.

[0024] FIG. 4: The effect of cellobiose accumulation on the activity of a wild-type CBH I and a R268K/R411K variant CBH I based on percent conversion of glucan after 72 hours in the bagasse assay in the presence (+) and absence (−) of β-glucosidase (BG). Activity is normalized to wild type activity with BG (WT+=1).

[0025] FIG. 5: Characterization of cellobiose product tolerance of variant CBH I polypeptides, based on percent conversion of glucan after 72 hours in the absence and presence of β-glucosidase (BG) in the bagasse assay; tolerance is evaluated as a function of the ratio of activity in the absence vs. presence of β-glucosidase.

[0026] FIG. 6: Scheme 1. Primary Screening flow sheet.

[0027] FIG. 7: Scheme 2. Secondary Screening flow sheet.

[0028] FIG. 8: Saccharification assay demonstrating that variant library retains enzymatic activity.

[0029] FIG. 9: Representative IC₅₀ curves for the serine mutation with IC₅₀ values of 0.45, 0.89, 6.8, and 9.12 for 268S, 411 S, 268A/411S, and 268S/411A, respectively. Curves show the clear synergistic shift in IC₅₀ value resulting from the double mutants. Specific activity effects can be clearly seen with higher relative fluorescence units for variants having the 268 mutation.

[0030] FIG. 10: Three dimensional plot of IC₅₀ values: x-axis indicates amino acid mutations; bars on the z-axis represents experimentally determined IC₅₀ values; y-axis shows the sequence context of the mutations.

[0031] FIG. 11: Three dimensional plot for specific activity increases by 4MUL: x-axis indicates amino acid mutations; bars on the z-axis represents experimentally determined SA values; y-axis shows the sequence context of the mutations.

[0032] TABLE 1: Amino acid sequences of exemplary “reference” CBH I polypeptides that can be modified at positions corresponding to R268 and/or R411 in T. reesei CBH I (SEQ ID NO:2). The database accession numbers are indicated in the second column. Unless indicated otherwise, the accession numbers refer to the Genbank database. “#” indicates that the CBH I has no signal peptide; “&” indicate that the sequence is from the PDB database and represents the catalytic domain only without signal sequence; * indicates a nonpublic database. These amino acid sequences are mostly wild type, with the exception of some sequences from the PDB database which contain mutations to facilitate protein crystallization.

[0033] TABLE 2: Amino acid positions in the exemplary reference CBH I polypeptides that correspond to R268 and R411 in T. reesei CBH I. Database descriptors are as for Table 1.

[0034] TABLE 3: Approximate amino acid positions of CBH I polypeptide domains. Abbreviations used: SS is signal sequence; CD is catalytic domain; and CBD is cellulose binding domain. Database descriptors are as for Table 1.

[0035] TABLE 4: Table 4 shows a segment within the catalytic domain of each exemplary reference CBH I polypeptide containing the active site loop (shown in bold, underlined text) and the catalytic residues (glutamates in most CBH I polypeptides) (shown in bold, double underlined text). Database descriptors are as for Table 1.

[0036] TABLE 5: MUL and bagasse assay results for variants of BD29555. ND means not determined. ±% Activity (+/− cellobiose)=[(Activity with cellobiose)/(Activity without cellobiose)]*100. ¥ % Activity (−/+BG)=[(Activity without BG)/(Activity with BG)]*100]

[0037] TABLE 6: MUL and bagasse assay results for variants of T. reesei CBH I. ND means not determined. +% Activity (+/− cellobiose)=[(Activity with cellobiose)/(Activity without cellobiose)]*100. ¥% Activity (−/+BG)=[(Activity without BG)/(Activity with BG)]*100.

[0038] TABLE 7: Informal sequence listing. SEQ ID NO:1-149 correspond to the exemplary reference CBH I polypeptides. SEQ ID NO:299 corresponds to mature T. reesei CBH I (amino acids 26-529 of SEQ ID NO:2) with an R268A substitution. SEQ ID NO:300 corresponds to mature T. reesei CBH I (amino acids 26-529 of SEQ ID NO:2) with an R411A substitution. SEQ ID NO:301 corresponds to full length BD29555 with both an R268K substitution and an R411K substitution. SEQ ID NO:302 corresponds to mature BD29555 with both an R268K substitution and an R411K substitution.

[0039] TABLE 8: Primary Screening Results (10 μL enzyme; cellobiose range: 0.0001-100 mM; n=1)

[0040] TABLE 9: Secondary Screening IC₅₀s (CBH I levels normalized to 5 μg/μL; cellobiose range: 0.0001-100 mM)

[0041] TABLE 10: Secondary Screening IC₅₀, (CBH I levels normalized to 5 μg/μL, cellobiose range: 0.00085-100 mM)

[0042] TABLE 11: Secondary Screening IC₅₀s (304 harvested supernatant; cellobiose range: 0.00085-100 mM)

[0043] TABLE 12: Merged IC₅₀ values (from Tables 8-11) showing increased tolerance by single mutations and synergistic increase by double mutation. ND=not determined; ^{¥}=data with fewer than 3 replicates and/or curve fitting with R²<0.95; * Improvement of variant IC₅₀ value over wild type=variant/WT (where WT IC50=0.046); ̂ expected=additive IC₅₀ value based on single measurements; ** synergistic increase=measured/expected.

[0044] TABLE 13: Specific Activity (SA, μmol 4 MU/min/mg CBH I) values. *Δ SA: change in specific activity; ratio of variant: WT; ^{¥} data derived from variants with low protein quantification, with fewer than 3 replicates and/or curve fitting with R²<0.95; WT Specific Activity=0.76.

[0045] TABLE 14: Table of possible single and double R268 and/or R411 substitutions that can be introduced into a CBH I polypeptide.

### DETAILED DESCRIPTION

[0046] The present disclosure relates to variant CBH I polypeptides. Most naturally occurring CBH I polypeptides have arginines at positions corresponding to R268 and R411 of T. reesei CBH I (SEQ ID NO:2). The variant CBH I polypeptides of the present disclosure include a substitution at either or both positions resulting in a reduction of product (e.g., cellobiose) inhibition, and/or an improved specific activity. The following subsections describe in greater detail the variant CBH I polypeptides and exemplary methods of their production, exemplary cellulase compositions comprising them, and some industrial applications of the polypeptides and cellulase compositions.

[0047] 1.1. Variant CBH I Polypeptides

[0048] The present disclosure provides variant CBH I polypeptides comprising at least one amino acid substitution that results in reduced product inhibition. “Variant” means a polypeptide which differs in sequence from a reference polypeptide by substitution of one or more amino acids at one or a number of different sites in the amino acid sequence. Exemplary reference CBH I polypeptides are shown in Table 1.

[0049] The variant CBH I polypeptides of the disclosure have an amino acid substitution at the amino acid position corresponding to R268 of T. reesei CBH I (SEQ ID NO:2) (an “R268 substitution”), (b) a substitution at the amino acid position corresponding to R411 of T. reesei CBH I (“R411 substitution”); or (c) both an R268 substitution and an R411 substitution, as compared to a reference CBH I polypeptide. It is noted that the R268 and R411 numbering is made by reference to the full length T. reesei CBH I, which includes a signal sequence that is generally absent from the mature enzyme. The corresponding numbering in the mature T. reesei CBH I (see, e.g., SEQ ID NO:4) is R251 and R394, respectively.

[0050] Accordingly, the present disclosure provides variant CBH I polypeptides in which at least one of the amino acid positions corresponding to R268 and R411 of T. reesei CBH I, and optionally both the amino acid positions corresponding to 8268 and R411 of T. reesei CBH I, is not an arginine.

[0051] The amino acid positions in the reference polypeptides of Table 1 that correspond to R268 and R411 in T. reesei CBH I are shown in Table 2. Amino acid positions in other CBH 1 polypeptides that correspond to R268 and R411 can be identified through alignment of their sequences with T. reesei CBH I using a sequence comparison algorithm. Optimal alignment of sequences for comparison can be conducted, e.g., by the local homology algorithm of Smith & Waterman, 1981, Adv. Appl. Math. 2:482-89; by the homology alignment algorithm of Needleman & Wunsch, 1970, J. Mol. Biol. 48:443-53; by the search for similarity method of Pearson & Lipman, 1988, Proc. Nat'l Acad. Sci. USA 85:2444-48, by computerized implementations of these algorithms (GAP, BESTFIT, FASTA, and TFASTA in the Wisconsin Genetics Software Package, Genetics Computer Group, 575 Science Dr., Madison, Wis.), or by visual inspection.

[0052] The R268 and/or R411 substitutions can be selected from Table 14, which includes all possible 399 possible single and double R268 and R411 substitutions. In certain embodiments, the variants (a) R268K and R411K; (b) R268K and R411A; (c) R268A and R411K; (d) R268A and R411A; (e) R268A; (f) R268K; (g) R411A; or (h) R411K. In other embodiments, the variants are any variants in Table 14 except one or more of the variants (a) R268K and R411K; (b) R268K and R411A; (c) R268A and R411K; (d) R268A and R411A; (e) R268A; (f) R268K; (g) R411A; and (h) R411K.

[0053] CBH I polypeptides belong to the glycosyl hydrolase family 7 (“GH7”). The glycosyl hydrolases of this family include endoglucanases and cellobiohydrolases (exoglucanases). The cellobiohydrolases act processively from the reducing ends of cellulose chains to generate cellobiose. Cellulases of bacterial and fungal origin characteristically have a small cellulose-binding domain (“CBD”) connected to either the N or the C terminus of the catalytic domain (“CD”) via a linker peptide (see Suumakki et al., 2000, Cellulose 7: 189-209). The CD contains the active site whereas the CBD interacts with cellulose by binding the enzyme to it (van Tilbeurgh et al., 1986, FEBS Lett. 204(2): 223-227; Tomme et al., 1988, Eur. J. Biochem. 170:575-581). The three-dimensional structure of the catalytic domain of T. reesei CBH I has been solved (Divne et al., 1994, Science 265:524-528). The CD consists of two β-sheets that pack face-to-face to form a β-sandwich. Most of the remaining amino acids in the CD are loops connecting the β-sheets. Some loops are elongated and bend around the active site, forming cellulose-binding tunnel of (˜50 Å). In contrast, endoglucanases have an open substrate binding cleft/groove rather than a tunnel. Typically, the catalytic residues are glutamic acids corresponding to E229 and E234 of T. reesei CBH I.

[0054] The loops characteristic of the active sites (“the active site loops”) of reference CBH I polypeptides, which are absent from GH7 family endoglucanases, as well as catalytic glutamate residues of the reference CBH I polypeptides, are shown in Table 4. The variant CBH I polypeptides of the disclosure preferably retain the catalytic glutamate residues or may include a glutamine instead at the position corresponding to E234, as for SEQ ID NO:4. In some embodiments, the variant CBH I polypeptides contain no substitutions or only conservative substitutions in the active site loops relative to the reference CBH I polypeptides from which the variants are derived.

[0055] Many CBH I polypeptides do not have a CBD, and most studies concerning the activity of cellulase domains on different substrates have been carried out with only the catalytic domains of CBH I polypeptides. Because CDs with cellobiohydrolase activity can be generated by limited proteolysis of mature CBH I by papain (see, e.g., Chen et al., 1993, Biochem. Mol. Biol. Int. 30(5):901-10), they are often referred to as “core” domains. Accordingly, a variant CBH I can include only the CD “core” of CBH I. Exemplary reference CDs comprise amino acid sequences corresponding to positions 26 to 455 of SEQ ID NO:1, positions 18 to 444 of SEQ ID NO:2, positions 26 to 455 of SEQ ID NO:3, positions 1 to 427 of SEQ ID NO:4, positions 24 to 457 of SEQ ID NO:5, positions 18 to 448 of SEQ ID NO:6, positions 27 to 460 of SEQ ID NO:7, positions 27 to 460 of SEQ ID NO:8, positions 20 to 449 of SEQ ID NO:9, positions 1 to 424 of SEQ ID NO:10, positions 18 to 447 of SEQ ID NO:11, positions 18 to 434 of SEQ ID NO:12, positions 18 to 445 of SEQ ID NO:13, positions 19 to 454 of SEQ ID NO:14, positions 19 to 443 of SEQ ID NO:15, positions 2 to 426 of SEQ ID NO:16, positions 23 to 446 of SEQ ID NO:17, positions 19 to 449 of SEQ ID NO:18, positions 23 to 446 of SEQ ID NO:19, positions 19 to 449 of SEQ ID NO:20, positions 2 to 416 of SEQ ID NO:21, positions 19 to 454 of SEQ ID NO:22, positions 19 to 447 of SEQ ID NO:23, positions 19 to 447 of SEQ ID NO:24, positions 20 to 443 of SEQ ID NO:25, positions 18 to 447 of SEQ ID NO:26, positions 19 to 442 of SEQ ID NO:27, positions 18 to 451 of SEQ ID NO:28, positions 23 to 446 of SEQ ID NO:29, positions 18 to 444 of SEQ ID NO:30, positions 18 to 451 of SEQ ID NO:31, positions 18 to 447 of SEQ ID NO:32, positions 19 to 449 of SEQ ID NO:33, positions 18 to 447 of SEQ ID NO:34, positions 26 to 459 of SEQ ID NO:35, positions 19 to 450 of SEQ ID NO:36, positions 19 to 453 of SEQ ID NO:37, positions 18 to 448 of SEQ ID NO:38, positions 19 to 443 of SEQ ID NO:39, positions 19 to 442 of SEQ ID NO:40, positions 18 to 444 of SEQ ID NO:41, positions 24 to 457 of SEQ ID NO:42, positions 18 to 449 of SEQ ID NO:43, positions 19 to 453 of SEQ ID NO:44, positions 26 to 456 of SEQ ID NO:45, positions 19 to 451 of SEQ ID NO:46, positions 18 to 443 of SEQ ID NO:47, positions 18 to 448 of SEQ ID NO:48, positions 19 to 451 of SEQ ID NO:49, positions 18 to 444 of SEQ ID NO:50, positions 2 to 419 of SEQ ID NO:51, positions 27 to 461 of SEQ ID NO:52, positions 21 to 445 of SEQ ID NO:53, positions 19 to 449 of SEQ ID NO:54, positions 19 to 448 of SEQ ID NO:55, positions 18 to 443 of SEQ ID NO:56, positions 20 to 443 of SEQ ID NO:57, positions 18 to 448 of SEQ ID NO:58, positions 18 to 447 of SEQ ID NO:59, positions 26 to 455 of SEQ ID NO:60, positions 19 to 449 of SEQ ID NO:61, positions 19 to 449 of SEQ ID NO:62, positions 26 to 460 of SEQ ID NO:63, positions 18 to 448 of SEQ ID NO:64, positions 19 to 451 of SEQ ID NO:65, positions 19 to 447 of SEQ ID NO:66, positions 1 to 424 of SEQ ID NO:67, positions 19 to 448 of SEQ ID NO:68, positions 19 to 443 of SEQ ID NO:69, positions 23 to 447 of SEQ ID NO:70, positions 17 to 448 of SEQ ID NO:71, positions 19 to 449 of SEQ ID NO:72, positions 18 to 444 of SEQ ID NO:73, positions 23 to 458 of SEQ ID NO:74, positions 20 to 452 of SEQ ID NO:75, positions 18 to 435 of SEQ ID NO:76, positions 18 to 446 of SEQ ID NO:77, positions 22 to 457 of SEQ ID NO:78, positions 18 to 448 of SEQ ID NO:79, positions 1 to 431 of SEQ ID NO:80, positions 19 to 453 of SEQ ID NO:81, positions 21 to 440 of SEQ ID NO:82, positions 19 to 442 of SEQ ID NO:83, positions 18 to 448 of SEQ ID NO:84, positions 17 to 446 of SEQ ID NO:85, positions 18 to 447 of SEQ ID NO:86, positions 18 to 443 of SEQ ID NO:87, positions 23 to 448 of SEQ ID NO:88, positions 18 to 451 of SEQ ID NO:89, positions 21 to 447 of SEQ ID NO:90, positions 18 to 444 of SEQ ID NO:91, positions 19 to 442 of SEQ ID NO:92, positions 20 to 436 of SEQ ID NO:93, positions 18 to 450 of SEQ ID NO:94, positions 22 to 453 of SEQ ID NO:95, positions 16 to 472 of SEQ ID NO:96, positions 21 to 445 of SEQ ID NO:97, positions 19 to 447 of SEQ ID NO:98, positions 19 to 450 of SEQ ID NO:99, positions 19 to 451 of SEQ ID NO:100, positions 18 to 448 of SEQ ID NO:101, positions 19 to 442 of SEQ ID NO:102, positions 20 to 457 of SEQ ID NO:103, positions 19 to 454 of SEQ ID NO:104, positions 18 to 440 of SEQ ID NO:105, positions 18 to 439 of SEQ ID NO:106, positions 27 to 460 of SEQ ID NO:107, positions 23 to 446 of SEQ ID NO:108, positions 17 to 446 of SEQ ID NO:109, positions 21 to 447 of SEQ ID NO:110, positions 19 to 447 of SEQ ID NO:111, positions 18 to 449 of SEQ ID NO:112, positions 22 to 457 of SEQ ID NO:113, positions 18 to 445 of SEQ ID NO:114, positions 18 to 448 of SEQ ID NO:115, positions 18 to 448 of SEQ ID NO:116, positions 23 to 435 of SEQ ID NO:117, positions 21 to 442 of SEQ ID NO:118, positions 23 to 435 of SEQ ID NO:119, positions 20 to 445 of SEQ ID NO:120, positions 21 to 443 of SEQ ID NO:121, positions 20 to 445 of SEQ ID NO:122, positions 23 to 443 of SEQ ID NO:123, positions 20 to 445 of SEQ ID NO:124, positions 21 to 435 of SEQ ID NO:125, positions 20 to 437 of SEQ ID NO:126, positions 21 to 442 of SEQ ID NO:127, positions 23 to 434 of SEQ ID NO:128, positions 20 to 444 of SEQ ID NO:129, positions 21 to 435 of SEQ ID NO:130, positions 20 to 445 of SEQ ID NO:131, positions 21 to 446 of SEQ ID NO:132, positions 21 to 435 of SEQ ID NO:133, positions 22 to 448 of SEQ ID NO:134, positions 23 to 433 of SEQ ID NO:135, positions 23 to 434 of SEQ ID NO:136, positions 23 to 435 of SEQ ID NO:137, positions 23 to 435 of SEQ ID NO:138, positions 20 to 445 of SEQ ID NO:139, positions 20 to 437 of SEQ ID NO:140, positions 21 to 435 of SEQ ID NO:141, positions 20 to 437 of SEQ ID NO:142, positions 21 to 435 of SEQ ID NO:143, positions 26 to 435 of SEQ ID NO:144, positions 23 to 435 of SEQ ID NO:145, positions 24 to 443 of SEQ ID NO:146, positions 20 to 445 of SEQ ID NO:147, positions 21 to 441 of SEQ ID NO:148, and positions 20 to 437 of SEQ ID NO:149.

[0056] The CBDs are particularly involved in the hydrolysis of crystalline cellulose. It has been shown that the ability of cellobiohydrolases to degrade crystalline cellulose decreases when the CBD is absent (Linder and Teed, 1997, Journal of Biotechnol. 57:15-28). The variant CBH I polypeptides of the disclosure can further include a CBD. Exemplary CBDs comprise amino acid sequences corresponding to positions 494 to 529 of SEQ ID NO:1, positions 480 to 514 of SEQ ID NO:2, positions 494 to 529 of SEQ ID NO:3, positions 491 to 526 of SEQ ID NO:5, positions 477 to 512 of SEQ ID NO:6, positions 497 to 532 of SEQ ID NO:7, positions 504 to 539 of SEQ ID NO:8, positions 486 to 521 of SEQ ID NO:13, positions 556 to 596 of SEQ ID NO:15, positions 490 to 525 of SEQ ID NO:18, positions 495 to 530 of SEQ ID NO:20, positions 471 to 506 of SEQ ID NO:23, positions 481 to 516 of SEQ ID NO:27, positions 480 to 514 of SEQ ID NO:30, positions 495 to 529 of SEQ ID NO:35, positions 493 to 528 of SEQ ID NO:36, positions 477 to 512 of SEQ ID NO:38, positions 547 to 586 of SEQ ID NO:39, positions 475 to 510 of SEQ ID NO:40, positions 479 to 513 of SEQ ID NO:41, positions 506 to 541 of SEQ ID NO:42, positions 481 to 516 of SEQ ID NO:43, positions 503 to 537 of SEQ ID NO:45, positions 488 to 523 of SEQ ID NO:46, positions 476 to 511 of SEQ ID NO:48, positions 488 to 523 of SEQ ID NO:49, positions 479 to 513 of SEQ ID NO:50, positions 500 to 535 of SEQ ID NO:52, positions 493 to 528 of SEQ ID NO:55, positions 479 to 514 of SEQ ID NO:58, positions 494 to 529 of SEQ ID NO:60, positions 490 to 525 of SEQ ID NO:61, positions 497 to 532 of SEQ ID NO:62, positions 475 to 510 of SEQ ID NO:64, positions 477 to 512 of SEQ ID NO:65, positions 486 to 521 of SEQ ID NO:66, positions 470 to 505 of SEQ ID NO:67, positions 491 to 526 of SEQ ID NO:68, positions 476 to 511 of SEQ ID NO:69, positions 480 to 514 of SEQ ID NO:73, positions 506 to 540 of SEQ ID NO:74, positions 471 to 504 of SEQ ID NO:76, positions 501 to 536 of SEQ ID NO:78, positions 473 to 508 of SEQ ID NO:79, positions 481 to 516 of SEQ ID NO:83, positions 488 to 523 of SEQ ID NO:86, positions 475 to 510 of SEQ ID NO:92, positions 468 to 504 of SEQ ID NO:93, positions 501 to 536 of SEQ ID NO:96, positions 482 to 517 of SEQ ID NO:98, positions 481 to 516 of SEQ ID NO:99, positions 488 to 523 of SEQ ID NO:100, positions 472 to 507 of SEQ ID NO:101, positions 481 to 516 of SEQ ID NO:102, positions 471 to 505 of SEQ ID NO:105, positions 481 to 516 of SEQ ID NO:106, positions 495 to 530 of SEQ ID NO:107, positions 488 to 523 of SEQ ID NO:111, positions 478 to 513 of SEQ ID NO:112, positions 501 to 536 of SEQ ID NO:113, positions 491 to 526 of SEQ ID NO:115, and positions 503 to 538 of SEQ ID NO:116.

[0057] The CD and CBD are often connected via a linker. Exemplary linker sequences correspond to positions 456 to 493 of SEQ ID NO:1, positions 445 to 479 of SEQ ID NO:2, positions 456 to 493 of SEQ ID NO:3, positions 458 to 490 of SEQ ID NO:5, positions 449 to 476 of SEQ ID NO:6, positions 461 to 496 of SEQ ID NO:7, positions 461 to 503 of SEQ ID NO:8, positions 446 to 485 of SEQ ID NO:13, positions 444 to 555 of SEQ ID NO:15, positions 450 to 489 of SEQ ID NO:18, positions 450 to 494 of SEQ ID NO:20, positions 448 to 470 of SEQ ID NO:23, positions 443 to 480 of SEQ ID NO:27, positions 445 to 479 of SEQ ID NO:30, positions 460 to 494 of SEQ ID NO:35, positions 451 to 492 of SEQ ID NO:36, positions 449 to 476 of SEQ ID NO:38, positions 444 to 546 of SEQ ID NO:39, positions 443 to 474 of SEQ ID NO:40, positions 445 to 478 of SEQ ID NO:41, positions 458 to 505 of SEQ ID NO:42, positions 450 to 480 of SEQ ID NO:43, positions 457 to 502 of SEQ ID NO:45, positions 452 to 487 of SEQ ID NO:46, positions 449 to 475 of SEQ ID NO:48, positions 452 to 487 of SEQ ID NO:49, positions 445 to 478 of SEQ ID NO:50, positions 462 to 499 of SEQ ID NO:52, positions 449 to 492 of SEQ ID NO:55, positions 449 to 478 of SEQ ID NO:58, positions 456 to 493 of SEQ ID NO:60, positions 450 to 489 of SEQ ID NO:61, positions 450 to 496 of SEQ ID NO:62, positions 449 to 474 of SEQ ID NO:64, positions 452 to 476 of SEQ ID NO:65, positions 448 to 485 of SEQ ID NO:66, positions 425 to 469 of SEQ ID NO:67, positions 449 to 490 of SEQ ID NO:68, positions 444 to 475 of SEQ ID NO:69, positions 445 to 479 of SEQ ID NO:73, positions 459 to 505 of SEQ ID NO:74, positions 436 to 470 of SEQ ID NO:76, positions 458 to 500 of SEQ ID NO:78, positions 449 to 472 of SEQ ID NO:79, positions 443 to 480 of SEQ ID NO:83, positions 448 to 487 of SEQ ID NO:86, positions 443 to 474 of SEQ ID NO:92, positions 437 to 467 of SEQ ID NO:93, positions 473 to 500 of SEQ ID NO:96, positions 448 to 481 of SEQ ID NO:98, positions 451 to 480 of SEQ ID NO:99, positions 452 to 487 of SEQ ID NO:100, positions 449 to 471 of SEQ ID NO:101, positions 443 to 480 of SEQ ID NO:102, positions 441 to 470 of SEQ ID NO:105, positions 440 to 480 of SEQ ID NO:106, positions 461 to 494 of SEQ ID NO:107, positions 448 to 487 of SEQ ID NO:111, positions 450 to 478 of SEQ ID NO:112, positions 458 to 500 of SEQ ID NO:113, positions 449 to 490 of SEQ ID NO:115, and positions 449 to 502 of SEQ ID NO:116.

[0058] Because CBH I polypeptides are modular, the CBDs, CDs and linkers of different CBH I polypeptides, such as the exemplary CBH I polypeptides of Table 1, can be used interchangeably. However, in a preferred embodiment, the CBDs, CDs and linkers of a variant CBH I of the disclosure originate from the same polypeptide.

[0059] The variant CBH I polypeptides of the disclosure preferably have at least a two-fold reduction of product inhibition, such that cellobiose has an IC₅₀ towards the variant CBH I that is at least 2-fold the IC₅₀ of the corresponding reference CBH I, e.g., CBH I lacking the R268 substitution and/or R411 substitution. More preferably the IC₅₀ of cellobiose towards the variant CBH I is at least 3-fold, at least 5-fold, at least 8-fold, at least 10-fold, at least 12-fold, at least 15-fold, at least 20-fold, at least 25-fold, at least 50-fold, at least 100-fold, at least 150-fold, at least 200-fold, at least 250-fold, at least 500-fold or at least 700-fold greater tolerance to cellobiose, and in some cases up to 750-fold or up to 1,000-fold, the IC₅₀ of the corresponding reference CBH I. In specific embodiments the IC₅₀ of cellobiose towards the variant CBH I is ranges from 2-fold to 15-fold, from 2-fold to 10-fold, from 3-fold to 10-fold, from 5-fold to 12-fold, from 4-fold to 12-fold, from 5-fold to 10-fold, from 5-fold to 12-fold, from 2-fold to 8-fold, from 8-fold to 20-fold, from 20-fold to 100-fold, from 50-fold to 150-fold, from 150-fold to 500-fold, from 200-fold to 750-fold, from 50-fold to 700-fold, or from 100-fold to 1,000-fold the IC₅₀ of the corresponding reference CBH I.

[0060] The IC₅₀ can be determined in a phosphoric acid swollen cellulose (“PASC”) assay (Du et al., 2010, Applied Biochemistry and Biotechnology 161:313-317) or a methylumbelliferyl lactoside (“MUL”) assay (van Tilbeurgh and Claeyssens, 1985, FEBS Letts. 187(2):283-288), as exemplified in the Examples below.

[0061] The variant CBH I polypeptides of the disclosure preferably have a cellobiohydrolase activity that is at least 30% the cellobiohydrolase activity of the corresponding reference CBH I, e.g., CBH I lacking the R268 substitution and/or R411 substitution. More preferably, the cellobiohydrolase activity of the variant CBH I is at least 40%, at least 50%, at least 60%, at least 70%, at least 80%, at least 90%, or 100% the cellobiohydrolase activity of the corresponding reference CBH I, and in some cases 150%, 200%, 250%, 300%, 350%, 400% or 450% the cellobiohydrolase activity of the corresponding reference CBH I. In specific embodiments the cellobiohydrolase activity of the variant CBH I is ranges from 30% to 80%, from 40% to 70%, 30% to 60%, from 50% to 80%, from 60% to 80%, from 70% to 450%, from 80% to 350%, from 100% to 450%, from 150% to 450%, from 100% to 400%, from 150% to 400%, or from 90% to 450% of the cellobiohydrolase activity of the corresponding reference CBH I. Assays for cellobiohydrolase activity are described, for example, in Becker et al., 2011, Biochem J. 356:19-30 and Mitsuishi et al., 1990, FEBS Letts. 275:135-138, each of which is expressly incorporated by reference herein. The ability of CBH I to hydrolyze isolated soluble and insoluble substrates can also be measured using assays described in Srisodsuk et al., 1997, J. Biotech. 57:4957 and Nidetzky and Claeyssens, 1994, Biotech. Bioeng. 44:961-966. Substrates useful for assaying cellobiohydrolase activity include crystalline cellulose, filter paper, phosphoric acid swollen cellulose, cellooligosaccharides, methylumbelliferyl lactoside, methylumbelliferyl cellobioside, orthonitrophenyl lactoside, paranitrophenyl lactoside, orthonitrophenyl cellobioside, paranitrophenyl cellobioside. Cellobiohydrolase activity can be measured in an assay utilizing PASC as the substrate and a calcofluor white detection method (Du et al., 2010, Applied Biochemistry and Biotechnology 161:313-317). PASC can be prepared as described by Walseth, 1952, TAPPI 35:228-235 and Wood, 1971, Biochem. J. 121:353-362.

[0062] Other than said R268 and/or R411 substitution, the variant CBH I polypeptides of the disclosure preferably:
[0063] comprise an amino acid sequence having at least 50%, 51%, 52%, 53%, 54%, 55%, 56%, 57%, 58%, 59%, 60%, 61%, 62%, 63%, 64%, 65%, 66%, 67%, 68%, 69%, 70%, 71%, 72%, 73%, 74%, 75%, 76%, 77%, 78%, 79%, 80%, 81%, 82%, 83%, 84%, 85%, 86%, 87%, 88%, 89%, 90%, 91%, 92%, 93%, 94%, 95%, 96%, 97%, 98%, 99%, or more, or complete (100%) sequence identity to a CD of a reference CBH I exemplified in Table 1 (i.e., a CD comprising an amino acid sequence corresponding to positions 26 to 455 of SEQ ID NO:1, positions 18 to 444 of SEQ ID NO:2, positions 26 to 455 of SEQ ID NO:3, positions 1 to 427 of SEQ ID NO:4, positions 24 to 457 of SEQ ID NO:5, positions 18 to 448 of SEQ ID NO:6, positions 27 to 460 of SEQ ID NO:7, positions 27 to 460 of SEQ ID NO:8, positions 20 to 449 of SEQ ID NO:9, positions 1 to 424 of SEQ ID NO:10, positions 18 to 447 of SEQ ID NO:11, positions 18 to 434 of SEQ ID NO:12, positions 18 to 445 of SEQ ID NO:13, positions 19 to 454 of SEQ ID NO:14, positions 19 to 443 of SEQ ID NO:15, positions 2 to 426 of SEQ ID NO:16, positions 23 to 446 of SEQ ID NO:17, positions 19 to 449 of SEQ ID NO:18, positions 23 to 446 of SEQ ID NO:19, positions 19 to 449 of SEQ ID NO:20, positions 2 to 416 of SEQ ID NO:21, positions 19 to 454 of SEQ ID NO:22, positions 19 to 447 of SEQ ID NO:23, positions 19 to 447 of SEQ ID NO:24, positions 20 to 443 of SEQ ID NO:25, positions 18 to 447 of SEQ ID NO:26, positions 19 to 442 of SEQ ID NO:27, positions 18 to 451 of SEQ ID NO:28, positions 23 to 446 of SEQ ID NO:29, positions 18 to 444 of SEQ ID NO:30, positions 18 to 451 of SEQ ID NO:31, positions 18 to 447 of SEQ ID NO:32, positions 19 to 449 of SEQ ID NO:33, positions 18 to 447 of SEQ ID NO:34, positions 26 to 459 of SEQ ID NO:35, positions 19 to 450 of SEQ ID NO:36, positions 19 to 453 of SEQ ID NO:37, positions 18 to 448 of SEQ ID NO:38, positions 19 to 443 of SEQ ID NO:39, positions 19 to 442 of SEQ ID NO:40, positions 18 to 444 of SEQ ID NO:41, positions 24 to 457 of SEQ ID NO:42, positions 18 to 449 of SEQ ID NO:43, positions 19 to 453 of SEQ ID NO:44, positions 26 to 456 of SEQ ID NO:45, positions 19 to 451 of SEQ ID NO:46, positions 18 to 443 of SEQ ID NO:47, positions 18 to 448 of SEQ ID NO:48, positions 19 to 451 of SEQ ID NO:49, positions 18 to 444 of SEQ ID NO:50, positions 2 to 419 of SEQ ID NO:51, positions 27 to 461 of SEQ ID NO:52, positions 21 to 445 of SEQ ID NO:53, positions 19 to 449 of SEQ ID NO:54, positions 19 to 448 of SEQ ID NO:55, positions 18 to 443 of SEQ ID NO:56, positions 20 to 443 of SEQ ID NO:57, positions 18 to 448 of SEQ ID NO:58, positions 18 to 447 of SEQ ID NO:59, positions 26 to 455 of SEQ ID NO:60, positions 19 to 449 of SEQ ID NO:61, positions 19 to 449 of SEQ ID NO:62, positions 26 to 460 of SEQ ID NO:63, positions 18 to 448 of SEQ ID NO:64, positions 19 to 451 of SEQ ID NO:65, positions 19 to 447 of SEQ ID NO:66, positions 1 to 424 of SEQ ID NO:67, positions 19 to 448 of SEQ ID NO:68, positions 19 to 443 of SEQ ID NO:69, positions 23 to 447 of SEQ ID NO:70, positions 17 to 448 of SEQ ID NO:71, positions 19 to 449 of SEQ ID NO:72, positions 18 to 444 of SEQ ID NO:73, positions 23 to 458 of SEQ ID NO:74, positions 20 to 452 of SEQ ID NO:75, positions 18 to 435 of SEQ ID NO:76, positions 18 to 446 of SEQ ID NO:77, positions 22 to 457 of SEQ ID NO:78, positions 18 to 448 of SEQ ID NO:79, positions 1 to 431 of SEQ ID NO:80, positions 19 to 453 of SEQ ID NO:81, positions 21 to 440 of SEQ ID NO:82, positions 19 to 442 of SEQ ID NO:83, positions 18 to 448 of SEQ ID NO:84, positions 17 to 446 of SEQ ID NO:85, positions 18 to 447 of SEQ ID NO:86, positions 18 to 443 of SEQ ID NO:87, positions 23 to 448 of SEQ ID NO:88, positions 18 to 451 of SEQ ID NO:89, positions 21 to 447 of SEQ ID NO:90, positions 18 to 444 of SEQ ID NO:91, positions 19 to 442 of SEQ ID NO:92, positions 20 to 436 of SEQ ID NO:93, positions 18 to 450 of SEQ ID NO:94, positions 22 to 453 of SEQ ID NO:95, positions 16 to 472 of SEQ ID NO:96, positions 21 to 445 of SEQ ID NO:97, positions 19 to 447 of SEQ ID NO:98, positions 19 to 450 of SEQ ID NO:99, positions 19 to 451 of SEQ ID NO:100, positions 18 to 448 of SEQ ID NO:101, positions 19 to 442 of SEQ ID NO:102, positions 20 to 457 of SEQ ID NO:103, positions 19 to 454 of SEQ ID NO:104, positions 18 to 440 of SEQ ID NO:105, positions 18 to 439 of SEQ ID NO:106, positions 27 to 460 of SEQ ID NO:107, positions 23 to 446 of SEQ ID NO:108, positions 17 to 446 of SEQ ID NO:109, positions 21 to 447 of SEQ ID NO:110, positions 19 to 447 of SEQ ID NO:111, positions 18 to 449 of SEQ ID NO:112, positions 22 to 457 of SEQ ID NO:113, positions 18 to 445 of SEQ ID NO:114, positions 18 to 448 of SEQ ID NO:115, positions 18 to 448 of SEQ ID NO:116, positions 23 to 435 of SEQ ID NO:117, positions 21 to 442 of SEQ ID NO:118, positions 23 to 435 of SEQ ID NO:119, positions 20 to 445 of SEQ ID NO:120, positions 21 to 443 of SEQ ID NO:121, positions 20 to 445 of SEQ ID NO:122, positions 23 to 443 of SEQ ID NO:123, positions 20 to 445 of SEQ ID NO:124, positions 21 to 435 of SEQ ID NO:125, positions 20 to 437 of SEQ ID NO:126, positions 21 to 442 of SEQ ID NO:127, positions 23 to 434 of SEQ ID NO:128, positions 20 to 444 of SEQ ID NO:129, positions 21 to 435 of SEQ ID NO:130, positions 20 to 445 of SEQ ID NO:131, positions 21 to 446 of SEQ ID NO:132, positions 21 to 435 of SEQ ID NO:133, positions 22 to 448 of SEQ ID NO:134, positions 23 to 433 of SEQ ID NO:135, positions 23 to 434 of SEQ ID NO:136, positions 23 to 435 of SEQ ID NO:137, positions 23 to 435 of SEQ ID NO:138, positions 20 to 445 of SEQ ID NO:139, positions 20 to 437 of SEQ ID NO:140, positions 21 to 435 of SEQ ID NO:141, positions 20 to 437 of SEQ ID NO:142, positions 21 to 435 of SEQ ID NO:143, positions 26 to 435 of SEQ ID NO:144, positions 23 to 435 of SEQ ID NO:145, positions 24 to 443 of SEQ ID NO:146, positions 20 to 445 of SEQ ID NO:147, positions 21 to 441 of SEQ ID NO:148, and positions 20 to 437 of SEQ ID NO:149 (preferably the CD corresponding to positions 26-455 of SEQ ID NO:1 or 18-444 of SEQ ID NO:2); and/or
[0064] comprise an amino acid sequence having at least 50%, 51%, 52%, 53%, 54%, 55%, 56%, 57%, 58%, 59%, 60%, 61%, 62%, 63%, 64%, 65%, 66%, 67%, 68%, 69%, 70%, 71%, 72%, 73%, 74%, 75%, 76%, 77%, 78%, 79%, 80%, 81%, 82%, 83%, 84%, 85%, 86%, 87%, 88%, 89%, 90%, 91%, 92%, 93%, 94%, 95%, 96%, 97%, 98%, 99%, or more, or complete (100%) sequence identity to a mature polypeptide of a reference CBH I exemplified in Table 1 (i.e., a mature protein comprising an amino acid sequence corresponding to positions 26 to 529 of SEQ ID NO:1, positions 18 to 514 of SEQ ID NO:2, positions 26 to 529 of SEQ ID NO:3, positions 1 to 427 of SEQ ID NO:4, positions 24 to 526 of SEQ ID NO:5, positions 18 to 512 of SEQ ID NO:6, positions 27 to 532 of SEQ ID NO:7, positions 27 to 539 of SEQ ID NO:8, positions 20 to 449 of SEQ ID NO:9, positions 1 to 424 of SEQ ID NO:10, positions 18 to 447 of SEQ ID NO:11, positions 18 to 434 of SEQ ID NO:12, positions 18 to 521 of SEQ ID NO:13, positions 19 to 454 of SEQ ID NO:14, positions 19 to 596 of SEQ ID NO:15, positions 2 to 426 of SEQ ID NO:16, positions 23 to 446 of SEQ ID NO:17, positions 19 to 525 of SEQ ID NO:18, positions 23 to 446 of SEQ ID NO:19, positions 19 to 530 of SEQ ID NO:20, positions 2 to 416 of SEQ ID NO:21, positions 19 to 454 of SEQ ID NO:22, positions 19 to 506 of SEQ ID NO:23, positions 19 to 447 of SEQ ID NO:24, positions 20 to 443 of SEQ ID NO:25, positions 18 to 447 of SEQ ID NO:26, positions 19 to 516 of SEQ ID NO:27, positions 18 to 451 of SEQ ID NO:28, positions 23 to 446 of SEQ ID NO:29, positions 18 to 514 of SEQ ID NO:30, positions 18 to 451 of SEQ ID NO:31, positions 18 to 447 of SEQ ID NO:32, positions 19 to 449 of SEQ ID NO:33, positions 18 to 447 of SEQ ID NO:34, positions 26 to 529 of SEQ ID NO:35, positions 19 to 528 of SEQ ID NO:36, positions 19 to 453 of SEQ ID NO:37, positions 18 to 512 of SEQ ID NO:38, positions 19 to 586 of SEQ ID NO:39, positions 19 to 510 of SEQ ID NO:40, positions 18 to 513 of SEQ ID NO:41, positions 24 to 541 of SEQ ID NO:42, positions 18 to 516 of SEQ ID NO:43, positions 19 to 453 of SEQ ID NO:44, positions 26 to 537 of SEQ ID NO:45, positions 19 to 523 of SEQ ID NO:46, positions 18 to 443 of SEQ ID NO:47, positions 18 to 511 of SEQ ID NO:48, positions 19 to 523 of SEQ ID NO:49, positions 18 to 513 of SEQ ID NO:50, positions 2 to 419 of SEQ ID NO:51, positions 27 to 535 of SEQ ID NO:52, positions 21 to 445 of SEQ ID NO:53, positions 19 to 449 of SEQ ID NO:54, positions 19 to 528 of SEQ ID NO:55, positions 18 to 443 of SEQ ID NO:56, positions 20 to 443 of SEQ ID NO:57, positions 18 to 514 of SEQ ID NO:58, positions 18 to 447 of SEQ ID NO:59, positions 26 to 529 of SEQ ID NO:60, positions 19 to 525 of SEQ ID NO:61, positions 19 to 532 of SEQ ID NO:62, positions 26 to 460 of SEQ ID NO:63, positions 18 to 510 of SEQ ID NO:64, positions 19 to 512 of SEQ ID NO:65, positions 19 to 521 of SEQ ID NO:66, positions 1 to 505 of SEQ ID NO:67, positions 19 to 526 of SEQ ID NO:68, positions 19 to 511 of SEQ ID NO:69, positions 23 to 447 of SEQ ID NO:70, positions 17 to 448 of SEQ ID NO:71, positions 19 to 449 of SEQ ID NO:72, positions 18 to 514 of SEQ ID NO:73, positions 23 to 540 of SEQ ID NO:74, positions 20 to 452 of SEQ ID NO:75, positions 18 to 504 of SEQ ID NO:76, positions 18 to 446 of SEQ ID NO:77, positions 22 to 536 of SEQ ID NO:78, positions 18 to 508 of SEQ ID NO:79, positions 1 to 431 of SEQ ID NO:80, positions 19 to 453 of SEQ ID NO:81, positions 21 to 440 of SEQ ID NO:82, positions 19 to 516 of SEQ ID NO:83, positions 18 to 448 of SEQ ID NO:84, positions 17 to 446 of SEQ ID NO:85, positions 18 to 523 of SEQ ID NO:86, positions 18 to 443 of SEQ ID NO:87, positions 23 to 448 of SEQ ID NO:88, positions 18 to 451 of SEQ ID NO:89, positions 21 to 447 of SEQ ID NO:90, positions 18 to 444 of SEQ ID NO:91, positions 19 to 510 of SEQ ID NO:92, positions 20 to 504 of SEQ ID NO:93, positions 18 to 450 of SEQ ID NO:94, positions 22 to 453 of SEQ ID NO:95, positions 16 to 536 of SEQ ID NO:96, positions 21 to 445 of SEQ ID NO:97, positions 19 to 517 of SEQ ID NO:98, positions 19 to 516 of SEQ ID NO:99, positions 19 to 523 of SEQ ID NO:100, positions 18 to 507 of SEQ ID NO:101, positions 19 to 516 of SEQ ID NO:102, positions 20 to 457 of SEQ ID NO:103, positions 19 to 454 of SEQ ID NO:104, positions 18 to 505 of SEQ ID NO:105, positions 18 to 516 of SEQ ID NO:106, positions 27 to 530 of SEQ ID NO:107, positions 23 to 446 of SEQ ID NO:108, positions 17 to 446 of SEQ ID NO:109, positions 21 to 447 of SEQ ID NO:110, positions 19 to 523 of SEQ ID NO:111, positions 18 to 513 of SEQ ID NO:112, positions 22 to 536 of SEQ ID NO:113, positions 18 to 445 of SEQ ID NO:114, positions 18 to 526 of SEQ ID NO:115, positions 18 to 538 of SEQ ID NO:116, positions 23 to 435 of SEQ ID NO:117, positions 21 to 442 of SEQ ID NO:118, positions 23 to 435 of SEQ ID NO:119, positions 20 to 445 of SEQ ID NO:120, positions 21 to 443 of SEQ ID NO:121, positions 20 to 445 of SEQ ID NO:122, positions 23 to 443 of SEQ ID NO:123, positions 20 to 445 of SEQ ID NO:124, positions 21 to 435 of SEQ ID NO:125, positions 20 to 437 of SEQ ID NO:126, positions 21 to 442 of SEQ ID NO:127, positions 23 to 434 of SEQ ID NO:128, positions 20 to 444 of SEQ ID NO:129, positions 21 to 435 of SEQ ID NO:130, positions 20 to 445 of SEQ ID NO:131, positions 21 to 446 of SEQ ID NO:132, positions 21 to 435 of SEQ ID NO:133, positions 22 to 448 of SEQ ID NO:134, positions 23 to 433 of SEQ ID NO:135, positions 23 to 434 of SEQ ID NO:136, positions 23 to 435 of SEQ ID NO:137, positions 23 to 435 of SEQ ID NO:138, positions 20 to 445, of SEQ ID NO:139, positions 20 to 437 of SEQ ID NO:140, positions 21 to 435 of SEQ ID NO:141, positions 20 to 437 of SEQ ID NO:142, positions 21 to 435 of SEQ ID NO:143, positions 26 to 435 of SEQ ID NO:144, positions 23 to 435 of SEQ ID NO:145, positions 24 to 443 of SEQ ID NO:146, positions 20 to 445 of SEQ ID NO:147, positions 21 to 441 of SEQ ID NO:148, and positions 20 to 437 of SEQ ID NO:149, preferably the mature polypeptide corresponding to positions 26-529 of SEQ ID NO:1 or 18-514 of SEQ ID NO:2).

[0065] An example of an algorithm that is suitable for determining sequence similarity is the BLAST algorithm, which is described in Altschul et al., 1990, J. Mol. Biol. 215:403-410. Software for performing BLAST analyses is publicly available through the National Center for Biotechnology Information. This algorithm involves first identifying high scoring sequence pairs (HSPs) by identifying short words of length W in the query sequence that either match or satisfy some positive-valued threshold score T when aligned with a word of the same length in a database sequence. These initial neighborhood word hits act as starting points to find longer HSPs containing them. The word hits are expanded in both directions along each of the two sequences being compared for as far as the cumulative alignment score can be increased. Extension of the word hits is stopped when: the cumulative alignment score falls off by the quantity X from a maximum achieved value; the cumulative score goes to zero or below; or the end of either sequence is reached. The BLAST algorithm parameters W, T, and X determine the sensitivity and speed of the alignment. The BLAST program uses as defaults a word length (W) of 11, the BLOSUM62 scoring matrix (see Henikoff & Henikoff, 1992, Proc. Nat'l. Acad. Sci. USA 89:10915-10919) alignments (B) of 50, expectation (E) of 10, M′5, N′-4, and a comparison of both strands.

[0066] Most CBH I polypeptides are secreted and are therefore expressed with a signal sequence that is cleaved upon secretion of the polypeptide from the cell. Accordingly, in certain aspects, the variant CBH I polypeptides of the disclosure further include a signal sequence. Exemplary signal sequences comprise amino acid sequences corresponding to positions 1 to 25 of SEQ ID NO:1, positions 1 to 17 of SEQ ID NO:2, positions 1 to 25 of SEQ ID NO:3, positions 1 to 23 of SEQ ID NO:5, positions 1 to 17 of SEQ ID NO:6, positions 1 to 26 of SEQ ID NO:7, positions 1 to 27 of SEQ ID NO:8, positions 1 to 19 of SEQ ID NO:9, positions 1 to 17 of SEQ ID NO:11, positions 1 to 17 of SEQ ID NO:12, positions 1 to 17 of SEQ ID NO:13, positions 1 to 18 of SEQ ID NO:14, positions 1 to 18 of SEQ ID NO:15, positions 1 to 22 of SEQ ID NO:17, positions 1 to 18 of SEQ ID NO:18, positions 1 to 22 of SEQ ID NO:19, positions 1 to 18 of SEQ ID NO:20, positions 1 to 18 of SEQ ID NO:22, positions 1 to 18 of SEQ ID NO:23, positions 1 to 18 of SEQ ID NO:24, positions 1 to 19 of SEQ ID NO:25, positions 1 to 17 of SEQ ID NO:26, positions 1 to 18 of SEQ ID NO:27, positions 1 to 17 of SEQ ID NO:28, positions 1 to 22 of SEQ ID NO:29, positions 1 to 18 of SEQ ID NO:30, positions 1 to 17 of SEQ ID NO:31, positions 1 to 17 of SEQ ID NO:32, positions 1 to 18 of SEQ ID NO:33, positions 1 to 17 of SEQ ID NO:34, positions 1 to 25 of SEQ ID NO:35, positions 1 to 18 of SEQ ID NO:36, positions 1 to 18 of SEQ ID NO:37, positions 1 to 17 of SEQ ID NO:38, positions 1 to 18 of SEQ ID NO:39, positions 1 to 18 of SEQ ID NO:40, positions 1 to 17 of SEQ ID NO:41, positions 1 to 23 of SEQ ID NO:42, positions 1 to 17 of SEQ ID NO:43, positions 1 to 18 of SEQ ID NO:44, positions 1 to 25 of SEQ ID NO:45, positions 1 to 18 of SEQ ID NO:46, positions 1 to 17 of SEQ ID NO:47, positions 1 to 17 of SEQ ID NO:48, positions 1 to 18 of SEQ ID NO:49, positions 1 to 17 of SEQ ID NO:50, positions 1 to 26 of SEQ ID NO:52, positions 1 to 20 of SEQ ID NO:53, positions 1 to 18 of SEQ ID NO:54, positions 1 to 18 of SEQ ID NO:55, positions 1 to 17 of SEQ ID NO:56, positions 1 to 19 of SEQ ID NO:57, positions 1 to 17 of SEQ ID NO:58, positions 1 to 17 of SEQ ID NO:59, positions 1 to 25 of SEQ ID NO:60, positions 1 to 18 of SEQ ID NO:61, positions 1 to 18 of SEQ ID NO:62, positions 1 to 25 of SEQ ID NO:63, positions 1 to 17 of SEQ ID NO:64, positions 1 to 18 of SEQ ID NO:65, positions 1 to 18 of SEQ ID NO:66, positions 1 to 18 of SEQ ID NO:68, positions 1 to 18 of SEQ ID NO:69, positions 1 to 23 of SEQ ID NO:70, positions 1 to 17 of SEQ ID NO:71, positions 1 to 18 of SEQ ID NO:72, positions 1 to 17 of SEQ ID NO:73, positions 1 to 22 of SEQ ID NO:74, positions 1 to 19 of SEQ ID NO:75, positions 1 to 17 of SEQ ID NO:76, positions 1 to 17 of SEQ ID NO:77, positions 1 to 21 of SEQ ID NO:78, positions 1 to 18 of SEQ ID NO:79, positions 1 to 18 of SEQ ID NO:81, positions 1 to 20 of SEQ ID NO:82, positions 1 to 18 of SEQ ID NO:83, positions 1 to 17 of SEQ ID NO:84, positions 1 to 16 of SEQ ID NO:85, positions 1 to 17 of SEQ ID NO:86, positions 1 to 17 of SEQ ID NO:87, positions 1 to 22 of SEQ ID NO:88, positions 1 to 17 of SEQ ID NO:89, positions 1 to 20 of SEQ ID NO:90, positions 1 to 17 of SEQ ID NO:91, positions 1 to 18 of SEQ ID NO:92, positions 1 to 19 of SEQ ID NO:93, positions 1 to 17 of SEQ ID NO:94, positions 1 to 21 of SEQ ID NO:95, positions 1 to 15 of SEQ ID NO:96, positions 1 to 20 of SEQ ID NO:97, positions 1 to 18 of SEQ ID NO:98, positions 1 to 18 of SEQ ID NO:99, positions 1 to 18 of SEQ ID NO:100, positions 1 to 17 of SEQ ID NO:101, positions 1 to 18 of SEQ ID NO:102, positions 1 to 19 of SEQ ID NO:103, positions 1 to 18 of SEQ ID NO:104, positions 1 to 17 of SEQ ID NO:105, positions 1 to 17 of SEQ ID NO:106, positions 1 to 26 of SEQ ID NO:107, positions 1 to 22 of SEQ ID NO:108, positions 1 to 16 of SEQ ID NO:109, positions 1 to 20 of SEQ ID NO:110, positions 1 to 18 of SEQ ID NO:111, positions 1 to 17 of SEQ ID NO:112, positions 1 to 21 of SEQ ID NO:113, positions 1 to 17 of SEQ ID NO:114, positions 1 to 17 of SEQ ID NO:115, positions 1 to 18 of SEQ ID NO:116, positions 1 to 22 of SEQ ID NO:117, positions 1 to 20 of SEQ ID NO:118, positions 1 to 22 of SEQ ID NO:119, positions 1 to 19 of SEQ ID NO:120, positions 1 to 20 of SEQ ID NO:121, positions 1 to 19 of SEQ ID NO:122, positions 1 to 22 of SEQ ID NO:123, positions 1 to 19 of SEQ ID NO:124, positions 1 to 20 of SEQ ID NO:125, positions 1 to 19 of SEQ ID NO:126, positions 1 to 21 of SEQ ID NO:127, positions 1 to 22 of SEQ ID NO:128, positions 1 to 19 of SEQ ID NO:129, positions 1 to 20 of SEQ ID NO:130, positions 1 to 19 of SEQ ID NO:131, positions 1 to 20 of SEQ ID NO:132, positions 1 to 20 of SEQ ID NO:133, positions 1 to 21 of SEQ ID NO:134, positions 1 to 22 of SEQ ID NO:135, positions 1 to 22 of SEQ ID NO:136, positions 1 to 22 of SEQ ID NO:137, positions 1 to 22 of SEQ ID NO:138, positions 1 to 19 of SEQ ID NO:139, positions 1 to 19 of SEQ ID NO:140, positions 1 to 20 of SEQ ID NO:141, positions 1 to 19 of SEQ ID NO:142, positions 1 to 20 of SEQ ID NO:143, positions 1 to 25 of SEQ ID NO:144, positions 1 to 22 of SEQ ID NO:145, positions 1 to 23 of SEQ ID NO:146, positions 1 to 19 of SEQ ID NO:147, positions 1 to 20 of SEQ ID NO:148, and positions 1 to 19 of SEQ ID NO:149.

[0067] 1.2. Recombinant Expression of Variant CBH I Polypeptides

[0068] 1.2.1. Cell Culture Systems

[0069] The disclosure also provides recombinant cells engineered to express variant CBH I polypeptides. Suitably, the variant CBH I polypeptide is encoded by a nucleic acid operably linked to a promoter. The promoters can be homologous or heterologous, and constitutive or inducible.

[0070] Suitable host cells include cells of any microorganism (e.g., cells of a bacterium, a protist, an alga, a fungus (e.g., a yeast or filamentous fungus), or other microbe), and are preferably cells of a bacterium, a yeast, or a filamentous fungus.

[0071] Where recombinant expression in a filamentous fungal host is desired, the promoter can be a fungal promoter (including but not limited to a filamentous fungal promoter), a promoter operable in plant cells, a promoter operable in mammalian cells.

[0072] As described in U.S. provisional application No. 61/553,901, filed Oct. 31, 2011, the contents of which are hereby incorporated in their entireties, promoters that are constitutively active in mammalian cells (which can derived from a mammalian genome or the genome of a mammalian virus) are capable of eliciting high expression levels in filamentous fungi such as Trichoderma reesei. An exemplary promoter is the cytomegalovirus (“CMV”) promoter.

[0073] As described in U.S. provisional application No. 61/553,897, filed Oct. 31, 2011, the contents of which are hereby incorporated in their entireties, promoters that are constitutively active in plant cells (which can derived from a plant genome or the genome of a plant virus) are capable of eliciting high expression levels in filamentous fungi such as Trichoderma reesei. Exemplary promoters are the cauliflower mosaic virus (“CaMV”) 35S promoter or the Commelina yellow mottle virus (“CoYMV”) promoter.

[0074] Mammalian, mammalian viral, plant and plant viral promoters can drive particularly high expression when the associated 5′ UTR sequence (i.e., the sequence which begins at the transcription start site and ends one nucleotide (nt) before the start codon) normally associated with the mammalian or mammalian viral promoter is replaced by a fungal 5′ UTR sequence.

[0075] The source of the 5′ UTR can vary provided it is operable in the filamentous fungal cell. In various embodiments, the 5′ UTR can be derived from a yeast gene or a filamentous fungal gene. The 5′ UTR can be from the same species one other component in the expression cassette (e.g. the promoter or the CBH I coding sequence), or from a different species. The 5′ UTR can be from the same species as the filamentous fungal cell that the expression construct is intended to operate in. In an exemplary embodiment, the 5′ UTR comprises a sequence corresponding to a fragment of a 5′ UTR from a T. reesei glyceraldehyde-3-phosphate dehydrogenase (gpd). In a specific embodiment, the 5′ UTR is not naturally associated with the CMV promoter

[0076] Examples of other promoters that can be used include, but are not limited to, a cellulase promoter, a xylanase promoter, the 1818 promoter (previously identified as a highly expressed protein by EST mapping Trichoderma). For example, the promoter can suitably be a cellobiohydrolase, endoglucanase, or β-glucosidase promoter. A particularly suitable promoter can be, for example, a T. reesei cellobiohydrolase, endoglucanase, or β-glucosidase promoter. Non-limiting examples of promoters include a cbh1, cbh2, egl1, egl2, egl3, egl4, egl5, pki1, gpd1, xyn1, or xyn2 promoter.

[0077] Suitable host cells of the bacterial genera include, but are not limited to, cells of Escherichia, Bacillus, Lactobacillus, Pseudomonas, and Streptomyces. Suitable cells of bacterial species include, but are not limited to; cells of Escherichia coli, Bacillus subtilis, Bacillus licheniformis, Lactobacillus brevis, Pseudomonas aeruginosa, and Streptomyces lividans.

[0078] Suitable host cells of the genera of yeast include, but are not limited to, cells of Saccharomyces, Schizosaccharomyces, Candida, Hansenula, Pichia, Kluyveromyces, and Phaffia. Suitable cells of yeast species include, but are not limited to, cells of Saccharomyces cerevisiae, Schizosaccharomyces pombe, Candida albicans, Hansenula polymorpha, Pichia pastoris, P. canadensis, Kluyveromyces marxianus, and Phaffia rhodozyma.

[0079] Suitable host cells of filamentous fungi include all filamentous forms of the subdivision Eumycotina. Suitable cells of filamentous fungal genera include, but are not limited to, cells of Acremonium, Aspergillus, Aureobasidium, Bjerkandera, Ceriporiopsis, Chrysoporium, Coprinus, Coriolus, Corynascus, Chaetomium, Cryptococcus, Filobasidium, Fusarium, Gibberella, Humicola, Hypocrea, Magnaporthe, Mucor, Myceliophthora, Mucor, Neocallimastix, Neurospora, Paecilomyces, Penicillium, Phanerochaete, Phlebia, Piromyces, Pleurotus, Scytaldium, Schizophyllum, Sporotrichum, Talaromyces, Thermoascus, Thielavia, Tolypocladium, Trametes, and Trichoderma. More preferably, the recombinant cell is a Trichoderma sp. (e.g., Trichoderma reesei), Penicillium sp., Humicola sp. (e.g., Humicola insolens); Aspergillus sp. (e.g., Aspergillus niger), Chrysosporium sp., Fusarium sp., or Hypocrea sp. Suitable cells can also include cells of various anamorph and teleomorph forms of these filamentous fungal genera.

[0080] Suitable cells of filamentous fungal species include, but are not limited to, cells of Aspergillus awamori, Aspergillus fumigatus, Aspergillus foetidus, Aspergillus japonicus, Aspergillus nidulans, Aspergillus niger, Aspergillus oryzae, Chrysosporium lucknowense, Fusarium bactridioides, Fusarium cerealis, Fusarium crookwellense, Fusarium culmorum, Fusarium graminearum, Fusarium graminurn, Fusarium heterosporum, Fusarium negundi, Fusarium oxysporum, Fusarium reticulatum, Fusarium roseum, Fusarium sambucinum, Fusarium sarcochroum, Fusarium sporotrichioides, Fusarium sulphureum, Fusarium torulosum, Fusarium trichothecioides, Fusarium venenatum, Bjerkandera adusta, Ceriporiopsis aneirina, Ceriporiopsis aneirina, Ceriporiopsis caregiea, Ceriporiopsis gilvescens, Ceriporiopsis pannocinta, Ceriporiopsis rivulosa, Ceriporiopsis subrufa, Ceriporiopsis subvermispora, Coprinus cinereus, Coriolus hirsutus, Humicola insolens, Humicola lanuginosa, Mucor miehei, Myceliophthora thermophila, Neurospora crassa, Neurospora intermedia, Penicillium purpurogenum, Penicillium canescens, Penicillium solitum, Penicillium funiculosum, Phanerochaete chrysosporium, Phlebia radiate, Pleurotus eryngii, Talaromyces flavus, Thielavia terrestris, Trametes villosa, Trametes versicolor, Trichoderma harzianum, Trichoderma koningii, Trichoderma longibrachiatum, Trichoderma reesei, and Trichoderma viride.

[0081] The engineered host cells can be cultured in conventional nutrient media modified as appropriate for activating promoters, selecting transformants, or amplifying the nucleic acid sequence encoding the variant CBH I polypeptide. Culture conditions, such as temperature, pH and the like, are those previously used with the host cell selected for expression, and will be apparent to those skilled in the art. As noted, many references are available for the culture and production of many cells, including cells of bacterial and fungal origin. Cell culture media in general are set forth in Atlas and Parks (eds.), 1993, The Handbook of Microbiological Media, CRC Press, Boca Raton, Fla., which is incorporated herein by reference. For recombinant expression in filamentous fungal cells, the cells are cultured in a standard medium containing physiological salts and nutrients, such as described in Pourquie et al., 1988, Biochemistry and Genetics of Cellulose Degradation, eds. Aubert, et al., Academic Press, pp. 71-86; and Ilmen et al., 1997, Appl. Environ. Microbiol. 63:1298-1306. Culture conditions are also standard, e.g., cultures are incubated at 28° C. in shaker cultures or fermenters until desired levels of variant CBH I expression are achieved. Preferred culture conditions for a given filamentous fungus may be found in the scientific literature and/or from the source of the fungi such as the American Type Culture Collection (ATCC). After fungal growth has been established, the cells are exposed to conditions effective to cause or permit the expression of a variant CBH I.

[0082] In cases where a variant CBH I coding sequence is under the control of an inducible promoter, the inducing agent, e.g., a sugar, metal salt or antibiotics, is added to the medium at a concentration effective to induce variant CBH I expression.

[0083] In one embodiment, the recombinant cell is an Aspergillus niger, which is a useful strain for obtaining overexpressed polypeptide. For example A. niger var. awamori dgr246 is known to product elevated amounts of secreted cellulases (Goedegebuur et al., 2002, Curr. Genet. 41:89-98). Other strains of Aspergillus niger var awamori such as GCDAP3, GCDAP4 and GAPS-4 are known (Ward et al., 1993, Appl. Microbiol. Biotechnol. 39:738-743).

[0084] In another embodiment, the recombinant cell is a Trichoderma reesei, which is a useful strain for obtaining overexpressed polypeptide. For example, RL-P37, described by Sheir-Neiss et al., 1984, Appl. Microbiol. Biotechnol. 20:46-53, is known to secrete elevated amounts of cellulase enzymes. Functional equivalents of RL-P37 include Trichoderma reesei strain RUT-C30 (ATCC No. 56765) and strain QM9414 (ATCC No. 26921). It is contemplated that these strains would also be useful in overexpressing variant CBH I polypeptides.

[0085] Cells expressing the variant CBH I polypeptides of the disclosure can be grown under batch, fed-batch or continuous fermentations conditions. Classical batch fermentation is a closed system, wherein the compositions of the medium is set at the beginning of the fermentation and is not subject to artificial alternations during the fermentation. A variation of the batch system is a fed-batch fermentation in which the substrate is added in increments as the fermentation progresses. Fed-batch systems are useful when catabolite repression is likely to inhibit the metabolism of the cells and where it is desirable to have limited amounts of substrate in the medium. Batch and fed-batch fermentations are common and well known in the art. Continuous fermentation is an open system where a defined fermentation medium is added continuously to a bioreactor and an equal amount of conditioned medium is removed simultaneously for processing. Continuous fermentation generally maintains the cultures at a constant high density where cells are primarily in log phase growth. Continuous fermentation systems strive to maintain steady state growth conditions. Methods for modulating nutrients and growth factors for continuous fermentation processes as well as techniques for maximizing the rate of product formation are well known in the art of industrial microbiology.

[0086] 1.2.2. Recombinant Expression in Plants

[0087] The disclosure provides transgenic plants and seeds that recombinantly express a variant CBH I polypeptide. The disclosure also provides plant products, e.g., oils, seeds, leaves, extracts and the like, comprising a variant CBH I polypeptide.

[0088] The transgenic plant can be dicotyledonous (a dicot) or monocotyledonous (a monocot). The disclosure also provides methods of making and using these transgenic plants and seeds. The transgenic plant or plant cell expressing a variant CBH I can be constructed in accordance with any method known in the art. See, for example, U.S. Pat. No. 6,309,872. T. reesei CBH I has been successfully expressed in transgenic tobacco (Nicotiana tabaccum) and potato (Solanum tuberosum). See Hooker et al., 2000, in Glycosyl Hydrolases for Biomass Conversion, ACS Symposium Series, Vol. 769, Chapter 4, pp. 55-90.

[0089] In a particular aspect, the present disclosure provides for the expression of CBH I variants in transgenic plants or plant organs and methods for the production thereof. DNA expression constructs are provided for the transformation of plants with a nucleic acid encoding the variant CBH I polypeptide, preferably under the control of regulatory sequences which are capable of directing expression of the variant CBH I polypeptide. These regulatory sequences include sequences capable of directing transcription in plants, either constitutively, or in stage and/or tissue specific manners.

[0090] The expression of variant CBH I polypeptides in plants can be achieved by a variety of means. Specifically, for example, technologies are available for transforming a large number of plant species, including dicotyledonous species (e.g., tobacco, potato, tomato, Petunia, Brassica) and monocot species. Additionally, for example, strategies for the expression of foreign genes in plants are available. Additionally still, regulatory sequences from plant genes have been identified that are serviceable for the construction of chimeric genes that can be functionally expressed in plants and in plant cells (e.g., Klee, 1987, Ann. Rev. of Plant Phys. 38:467-486; Clark et al., 1990, Virology 179(2):640-7; Smith et al., 1990, Mol. Gen. Genet. 224(3):477-81.

[0091] The introduction of nucleic acids into plants can be achieved using several technologies including transformation with Agrobacterium tumefaciens or Agrobacterium rhizogenes. Non-limiting examples of plant tissues that can be transformed include protoplasts, microspores or pollen, and explants such as leaves, stems, roots, hypocotyls, and cotyls. Furthermore, DNA encoding a variant CBH I can be introduced directly into protoplasts and plant cells or tissues by microinjection, electroporation, particle bombardment, and direct DNA uptake.

[0092] Variant CBH I polypeptides can be produced in plants by a variety of expression systems. For instance, the use of a constitutive promoter such as the 35S promoter of Cauliflower Mosaic Virus (Guilley et al., 1982, Cell 30:763-73) is serviceable for the accumulation of the expressed protein in virtually all organs of the transgenic plant. Alternatively, promoters that are tissue-specific and/or stage-specific can be used (Higgins, 1984, Annu. Rev. Plant Physiol. 35:191-221; Shotwell and Larkins, 1989, In: The Biochemistry of Plants Vol. 15 (Academic Press, San Diego: Stumpf and Conn, eds.), p. 297), permit expression of variant CBH I polypeptides in a target tissue and/or during a desired stage of development.

[0093] 1.3. Compositions Of Variant CBH I Polypeptides

[0094] In general, a variant CBH I polypeptide produced in cell culture is secreted into the medium and may be purified or isolated, e.g., by removing unwanted components from the cell culture medium. However, in some cases, a variant CBH I polypeptide may be produced in a cellular form necessitating recovery from a cell lysate. In such cases the variant CBH I polypeptide is purified from the cells in which it was produced using techniques routinely employed by those skilled in the art. Examples include, but are not limited to, affinity chromatography (Van Tilbeurgh et al., 1984, FEBS Lett. 169(2):215-218), ion-exchange chromatographic methods (Goyal et al., 1991, Bioresource Technology, 36:37-50; Fliess et al., 1983, Eur. J. Appl. Microbiol. Biotechnol. 17:314-318; Bhikhabhai et al., 1984, J. Appl. Biochem. 6:336-345; Ellouz et al., 1987, Journal of Chromatography, 396:307-317), including ion-exchange using materials with high resolution power (Medve et al., 1998, J. Chromatography A, 808:153-165), hydrophobic interaction chromatography (Tomaz and Queiroz, 1999, J. Chromatography A, 865:123-128), and two-phase partitioning (Brumbauer et al., 1999, Bioseparation 7:287-295).

[0095] The variant CBH I polypeptides of the disclosure are suitably used in cellulase compositions. Cellulases are known in the art as enzymes that hydrolyze cellulose (beta-1,4-glucan or beta D-glucosidic linkages) resulting in the formation of glucose, cellobiose, cellooligosaccharides, and the like. Cellulase enzymes have been traditionally divided into three major classes: endoglucanases (“EG”), exoglucanases or cellobiohydrolases (EC 3.2.1.91) (“CBH”) and beta-glucosidases (EC 3.2.1.21) (“BG”) (Knowles et al., 1987, TIBTECH 5:255-261; Schulein, 1988, Methods in Enzymology 160(25):234-243).

[0096] Certain fungi produce complete cellulase systems which include exo-cellobiohydrolases or CBH-type cellulases, endoglucanases or EG-type cellulases and β-glucosidases or BG-type cellulases (Schulein, 1988, Methods in Enzymology 160(25):234-243). Such cellulase compositions are referred to herein as “whole” cellulases. However, sometimes these systems lack CBH-type cellulases and bacterial cellulases also typically include little or no CBH-type cellulases. In addition, it has been shown that the EG components and CBH components synergistically interact to more efficiently degrade cellulose. See, e.g., Wood, 1985, Biochemical Society Transactions 13(2):407-410.

[0097] The cellulase compositions of the disclosure typically include, in addition to a variant CBH I polypeptide, one or more cellobiohydrolases, endoglucanases and/or β-glucosidases. In their crudest form, cellulase compositions contain the microorganism culture that produced the enzyme components. “Cellulase compositions” also refers to a crude fermentation product of the microorganisms. A crude fermentation is preferably a fermentation broth that has been separated from the microorganism cells and/or cellular debris (e.g., by centrifugation and/or filtration). In some cases, the enzymes in the broth can be optionally diluted, concentrated, partially purified or purified and/or dried. The variant CBH I polypeptide can be co-expressed with one or more of the other components of the cellulase composition or it can be expressed separately, optionally purified and combined with a composition comprising one or more of the other cellulase components.

[0098] When employed in cellulase compositions, the variant CBH I is generally present in an amount sufficient to allow release of soluble sugars from the biomass. The amount of variant CBH I enzymes added depends upon the type of biomass to be saccharified which can be readily determined by the skilled artisan. In certain embodiments, the weight percent of variant CBH I polypeptide is suitably at least 1, at least 5, at least 10, or at least 20 weight percent of the total polypeptides in a cellulase composition. Exemplary cellulase compositions include a variant CBH I of the disclosure in an amount ranging from about 1 to about 20 weight percent, from about 1 to about 25 weight percent, from about 5 to about 20 weight percent, from about 5 to about 25 weight percent, from about 5 to about 30 weight percent, from about 5 to about 35 weight percent, from about 5 to about 40 weight percent, from about 5 to about 45 weight percent, from about 5 to about 50 weight percent, from about 10 to about 20 weight percent, from about 10 to about 25 weight percent, from about 10 to about 30 weight percent, from about 10 to about 35 weight percent, from about 10 to about 40 weight percent, from about 10 to about 45 weight percent, from about 10 to about 50 weight percent, from about 15 to about 20 weight percent, from about 15 to about 25 weight percent, from about 15 to about 30 weight percent, from about 15 to about 35 weight percent, from about 15 to about 30 weight percent, from about 15 to about 45 weight percent, or from about 15 to about 50 weight percent of the total polypeptides in the composition.

[0099] 1.4. Utility of Variant CBH I Polypeptides

[0100] It can be appreciated that the variant CBH I polypeptides of the disclosure and compositions comprising the variant CBH I polypeptides find utility in a wide variety applications, for example detergent compositions that exhibit enhanced cleaning ability, function as a softening agent and/or improve the feel of cotton fabrics (e.g., “stone washing” or “biopolishing”), or in cellulase compositions for degrading wood pulp into sugars (e.g., for bio-ethanol production). Other applications include the treatment of mechanical pulp (Pere et al., 1996, Tappi Pulping Conference, pp. 693-696 (Nashville, Tenn., Oct. 27-31, 1996)), for use as a feed additive (see, e.g., WO 91/04673) and in grain wet milling.

[0101] 1.4.1. Saccharification Reactions

[0102] Ethanol can be produced via saccharification and fermentation processes from cellulosic biomass such as trees, herbaceous plants, municipal solid waste and agricultural and forestry residues. However, the ratio of individual cellulase enzymes within a naturally occurring cellulase mixture produced by a microbe may not be the most efficient for rapid conversion of cellulose in biomass to glucose. It is known that endoglucanases act to produce new cellulose chain ends which themselves are substrates for the action of cellobiohydrolases and thereby improve the efficiency of hydrolysis of the entire cellulase system. The use of optimized cellobiohydrolase activity may greatly enhance the production of ethanol.

[0103] Cellulase compositions comprising one or more of the variant CBH I polypeptides of the disclosure can be used in saccharification reaction to produce simple sugars for fermentation. Accordingly, the present disclosure provides methods for saccharification comprising contacting biomass with a cellulase composition comprising a variant CBH I polypeptide of the disclosure and, optionally, subjecting the resulting sugars to fermentation by a microorganism.

[0104] The term “biomass,” as used herein, refers to any composition comprising cellulose (optionally also hemicellulose and/or lignin). As used herein, biomass includes, without limitation, seeds, grains, tubers, plant waste or byproducts of food processing or industrial processing (e.g., stalks), corn (including, e.g., cobs, stover, and the like), grasses (including, e.g., Indian grass, such as Sorghastrum nutans; or, switchgrass, e.g., Panicum species, such as Panicum virgatum), wood (including, e.g., wood chips, processing waste), paper, pulp, and recycled paper (including, e.g., newspaper, printer paper, and the like). Other biomass materials include, without limitation, potatoes, soybean (e.g., rapeseed), barley, rye, oats, wheat, beets, and sugar cane bagasse.

[0105] The saccharified biomass (e.g., lignocellulosic material processed by enzymes of the disclosure) can be made into a number of bio-based products, via processes such as, e.g., microbial fermentation and/or chemical synthesis. As used herein, “microbial fermentation” refers to a process of growing and harvesting fermenting microorganisms under suitable conditions. The fermenting microorganism can be any microorganism suitable for use in a desired fermentation process for the production of bio-based products. Suitable fermenting microorganisms include, without limitation, filamentous fungi, yeast, and bacteria. The saccharified biomass can, for example, be made into a fuel (e.g., a biofuel such as a bioethanol, biobutanol, biomethanol, a biopropanol, a biodiesel, a jet fuel, or the like) via fermentation and/or chemical synthesis. The saccharified biomass can, for example, also be made into a commodity chemical (e.g., ascorbic acid, isoprene, 1,3-propanediol), lipids, amino acids, polypeptides, and enzymes, via fermentation and/or chemical synthesis.

[0106] Thus, in certain aspects, the variant CBH I polypeptides of the disclosure find utility in the generation of ethanol from biomass in either separate or simultaneous saccharification and fermentation processes. Separate saccharification and fermentation is a process whereby cellulose present in biomass is saccharified into simple sugars (e.g., glucose) and the simple sugars subsequently fermented by microorganisms (e.g., yeast) into ethanol. Simultaneous saccharification and fermentation is a process whereby cellulose present in biomass is saccharified into simple sugars (e.g., glucose) and, at the same time and in the same reactor, microorganisms (e.g., yeast) ferment the simple sugars into ethanol.

[0107] Prior to saccharification, biomass is preferably subject to one or more pretreatment step(s) in order to render cellulose material more accessible or susceptible to enzymes and thus more amenable to hydrolysis by the variant CBH I polypeptides of the disclosure.

[0108] In an exemplary embodiment, the pretreatment entails subjecting biomass material to a catalyst comprising a dilute solution of a strong acid and a metal salt in a reactor. The biomass material can, e.g., be a raw material or a dried material. This pretreatment can lower the activation energy, or the temperature, of cellulose hydrolysis, ultimately allowing higher yields of fermentable sugars. See, e.g., U.S. Pat. Nos. 6,660,506; 6,423,145.

[0109] Another exemplary pretreatment method entails hydrolyzing biomass by subjecting the biomass material to a first hydrolysis step in an aqueous medium at a temperature and a pressure chosen to effectuate primarily depolymerization of hemicellulose without achieving significant depolymerization of cellulose into glucose. This step yields a slurry in which the liquid aqueous phase contains dissolved monosaccharides resulting from depolymerization of hemicellulose, and a solid phase containing cellulose and lignin. The slurry is then subject to a second hydrolysis step under conditions that allow a major portion of the cellulose to be depolymerized, yielding a liquid aqueous phase containing dissolved/soluble depolymerization products of cellulose. See, e.g., U.S. Pat. No. 5,536,325.

[0110] A further exemplary method involves processing a biomass material by one or more stages of dilute acid hydrolysis using about 0.4% to about 2% of a strong acid; followed by treating the unreacted solid lignocellulosic component of the acid hydrolyzed material with alkaline delignification. See, e.g., U.S. Pat. No. 6,409,841. Another exemplary pretreatment method comprises prehydrolyzing biomass (e.g., lignocellulosic materials) in a prehydrolysis reactor; adding an acidic liquid to the solid lignocellulosic material to make a mixture; heating the mixture to reaction temperature; maintaining reaction temperature for a period of time sufficient to fractionate the lignocellulosic material into a solubilized portion containing at least about 20% of the lignin from the lignocellulosic material, and a solid fraction containing cellulose; separating the solubilized portion from the solid fraction, and removing the solubilized portion while at or near reaction temperature; and recovering the solubilized portion. The cellulose in the solid fraction is rendered more amenable to enzymatic digestion. See, e.g., U.S. Pat. No. 5,705,369. Further pretreatment methods can involve the use of hydrogen peroxide H₂O₂. See Gould, 1984, Biotech, and Bioengr. 26:46-52.

[0111] Pretreatment can also comprise contacting a biomass material with stoichiometric amounts of sodium hydroxide and ammonium hydroxide at a very low concentration. See Teixeira et al., 1999, Appl. Biochem. and Biotech. 77-79:19-34. Pretreatment can also comprise contacting a lignocellulose with a chemical (e.g., a base, such as sodium carbonate or potassium hydroxide) at a pH of about 9 to about 14 at moderate temperature, pressure, and pH. See PCT Publication WO2004/081185.

[0112] Ammonia pretreatment can also be used. Such a pretreatment method comprises subjecting a biomass material to low ammonia concentration under conditions of high solids. See, e.g., U.S. Patent Publication No. 20070031918 and PCT publication WO 06/110901.

[0113] 1.4.2. Detergent Compositions Comprising Variant CBH I Proteins

[0114] The present disclosure also provides detergent compositions comprising a variant CBH I polypeptide of the disclosure. The detergent compositions may employ besides the variant CBH I polypeptide one or more of a surfactant, including anionic, non-ionic and ampholytic surfactants; a hydrolase; a bleaching agents; a bluing agent; a caking inhibitors; a solubilizer; and a cationic surfactant. All of these components are known in the detergent art.

[0115] The variant CBH I polypeptide is preferably provided as part of cellulase composition. The cellulase composition can be employed from about 0.00005 weight percent to about 5 weight percent or from about 0.0002 weight percent to about 2 weight percent of the total detergent composition. The cellulase composition can be in the form of a liquid diluent, granule, emulsion, gel, paste, and the like. Such forms are known to the skilled artisan. When a solid detergent composition is employed, the cellulase composition is preferably formulated as granules. CL 2. Example 1

### Identification and Characterization of Product Tolerant Variants of CBH I

[0116] 2.1. Materials and Methods

[0117] 2.1.1. Preparation of CBH I Polypeptides for Biochemical Characterization

[0118] Protein expression was carried out in an Aspergillus niger host strain that had been transformed using PEG-mediated transformation with expression constructs for CBH I that included the hygromycin resistance gene as a selectable marker, in which the full length CBH I sequences (signal sequence, catalytic domain, linker and cellulose binding domain) were under the control of the glyceraldehyde-3-phosphate dehydrogenase (gpd) promoter. Transformants were selected on the regeneration medium based on resistance to hygromycin. The selected transformants were cultured in Aspergillus salts medium, pH 6.2 supplemented with the antibiotics penicillin, streptomycin, and hygromycin, and 80 g/L glycerol, 20 g/L soytone, 10 mM uridine, 20 g/L MES) in baffled shake flasks at 30° C., 170 rpm. After five days of incubation, the total secreted protein supernatant was recovered, and then subjected to hollow fiber filtration to concentrate and exchange the sample into acetate buffer (50 mM NaAc, pH 5). CBH I protein represented over 90% of the total protein in these samples. Protein purity was analyzed by SDS-PAGE. Protein concentration was determined by gel densitometry and/or HPLC analysis. All CBH I protein concentrations were normalized before assay and concentrated to 1-2.5 mg/ml.

[0119] 2.1.2. CBH I Activity Assays

[0120] Methylumbelliferyl Lactoside (4-MUL) Assay:

[0121] This assay measures the activity of CBH I on the fluorogenic substrate 4-MUL (also known as MUL). Assays were run in a costar 96-well black bottom plate, where reactions were initiated by the addition of 4-MUL to enzyme in buffer (2 mM 4-MUL in 200 mM MES pH 6). Enzymatic rates were monitored by fluorescent readouts over five minutes on a SPECTRAMAX™ plate reader (ex/em 365/450 nm). Data in the linear range was used to calculate initial rates (Vo).

[0122] Phosphoric Acid Swollen Cellulose (PASC) Assay:

[0123] This assay measures the activity of CBH I using PASC as the substrate. During the assay, the concentration of PASC is monitored by a fluorescent signal derived from calcofluor binding to PASC (ex/em 365/440 nm). The assay is initiated by mixing enzyme (15 μl) and reaction buffer (85 μl of 0.2% PASC, 200 mM MES, pH 6), and then incubating at 35° C. while shaking at 225 RPM. After 2 hours, one reaction volume of calcofluor stop solution (100 μg/ml in 500 mM glycine pH 10) is added and fluorescence read-outs obtained (ex/em 365/440 nm).

[0124] Saccharification Assay (Bagasse Assay):

[0125] This assay measures the activity of CBH I on bagasse, a lignocellulosic substrate. Reactions were run in 10 ml vials with 5% dilute acid pretreated bagasse (250 mg solids per 5 ml reaction). Each reaction contained 4 mg CBH I enzyme/g solids, 200 mM MES pH 6, kanamycin, and chloramphenicol. Reactions were incubated at 35° C. in hybridization incubators (Robbins Scientific), rotating at 20 RPM. Time points were taken by transferring a sample of homogenous slurry (150 μl) into a 96-well deep well plate and quenching the reaction with stop buffer (450 μl of 500 mM sodium carbonate, pH 10). Time point measurements were taken every 24 hours for 72 hours.

[0126] Cellobiose Tolerance Assays (or Cellobiose Inhibition Assays):

[0127] Tolerance to cellobiose (or inhibition caused by cellobiose) was tested in two ways in the CBH I assays. A direct-dose tolerance method can be applied to all of the CBH I assays (i.e., 4-MUL, PASC, and/or bagasse assays), and entails the exogenous addition of a known amount of cellobiose into assay mixtures. A different indirect method entails the addition of an excess amount of β-glucosidase (BG) to PASC and bagasse assays (typically, 1 mg β-glucosidase/g solids loaded). BG will enzymatically hydrolyze the cellobiose generated during these assays; therefore, CBH I activity in the presence of BG can be taken as a measure of activity in the absence of cellobiose. Furthermore, when activity in the presence and absence of BG are similar, this indicates tolerance to cellobiose. Notably, in cases where BG activity is undesired, but may be present in crude CBH I enzyme preparations, the BG inhibitor gluconolactone can be added into CBH I assays to prevent cellobiose breakdown.

[0128] 2.2. Library Screening Assays

[0129] The wild type CBH I polypeptide BD29555 was mutagenized to identify variants with improved product tolerance. A small (60-member) library of BD29555 variants was designed to identify variant CBH I polypeptides with reduced product inhibition. This product-release-site library was designed based on residues directly interacting with the cellobiose product in an attempt to identify variants with weakened interactions with cellobiose from which the product would be released more readily than the wild type enzyme. The 60-member evolution library contained wild-type residues and mutations at positions R273, W405, and R422 of BD29555 (SEQ ID NO:1), and included the following substitutions: R273 (WT), R273Q, R273K, R273A, W405 (WT), W405Q, W405H, R422 (WT), R422Q, R422K, R422L, and R422E (4 variants at position 273×3 variants at position 405×5 variants at position 422 equals 60 variants in total). All members of the library were screened using the 4-MUL assay in the presence and absence of 250 mg/L cellobiose and using gluconolactone to inhibit any BG activity. The R273A, R273Q, and R273K/R422K variants showed enhanced product tolerance. The R273K/R422K variant showed greatest activity, expression, and cellobiose tolerance at 250 mg/L (730 mM). Due to low expression, other variants were not tested further.

[0130] 2.3. Characterization of Product Tolerant Variants of BD29555

[0131] The R273K/R422K substitutions were characterized in both a wild type BD29555 background and also in combination with the substitutions Y274Q, D281K, Y410H, P411G, which were identified in a screen of an expanded product release site evolution library.

[0132] The wild type, the R273K/R422K variant and the R273K/Y274Q/D281K/Y410H/P411G/R422K variants were tested for activity on 4-MUL in the presence and absence of 250 mg/L cellobiose, and the R273K/R422K variant was also tested in the bagasse assay in the presence and absence of BG. The results are summarized in Table 5.

[0133] The results from these activity assays were converted into the percentage of activity remaining with and without cellobiose present, where values close to 100% indicated cellobiose tolerance. The percent of activity remaining in the MUL assay in the presence cellobiose versus in the absence of cellobiose shows that the R273K/R422K variant was the most tolerant, followed by the R273K/Y274Q/D281K/Y410H/P411G/R422K variant, and then wild-type, at 95%, 78%, and 25% activity, respectively.

[0134] Cellobiose dose response curves of the wild-type and R273K/R422K variant of BD29555 were obtained during the 4-MUL assay. Enzyme rates (Vo) were measured in the presence of different concentrations of cellobiose (200 mM MES pH 6, 25° C.). Rates were measured in quadruplicate. The results are shown in FIG. 1A-1B. FIG. 1A shows that wild type BD2955 is inhibited by cellobiose, with a half maximal inhibitory concentration (IC₅₀ value) of 60 mg/L. FIG. 1B shows that the R273K/R422K variant is tolerant to cellobiose up to 250 mg/L.

[0135] The bagasse assay results shown in Table 5, which lists the percentage of activity remaining in the absence vs. presence of BG, also demonstrate that the percentage activity of the wild type BD29555 is lower than the percentage activity of the R273K/R422K variant, indicating that the R273K/R422K variant is less sensitive to the presence of cellobiose than the wild type. FIG. 2A-2B shows bar graph data for the bagasse assay of BD29555 vs. the R273K/R422K variant. In FIG. 2A, bars represent relative activity, which has been normalized to wild type activity in the absence of cellobiose (WT+BG=uninhibited activity=1). In FIG. 2B, bars indicate tolerance to cellobiose, as represented by the ratio of activity in the presence of cellobiose (−BG) to that of activity in the absence of cellobiose (+BG); ratios close to 1 indicate greater tolerance to cellobiose. These data again demonstrate that the R273K/R422K variant of BD29555 is more tolerant to cellobiose than the wild type BD29555.

[0136] The wild type and R273K/R422K variant were also characterized in the PASC assay. Results are shown in FIG. 3. The activities of both wild type BD29555 (SEQ ID NO:1) and wild type T. reesei CBH I (SEQ ID NO:2) were inhibited by cellobiose concentrations starting around 1 g/L (with IC₅₀ values of 2.2 and 3 g/L, respectively), whereas the R273K/R422K variant showed little inhibition in the presence of 10 g/L cellobiose.

[0137] 2.4. Characterization of Product Tolerant Variants of T. reesei CBH I

[0138] Cellobiose product tolerant substitutions were introduced into T. reesei CBH I (SEQ ID NO:2). A panel of variants with single and double alanine and lysine substitutions at R268 and R411 were expressed and analyzed. The variants were tested for activity on 4-MUL in the presence and absence of 250 mg/L cellobiose and also in the bagasse assay in the absence and presence of BG. The results from these assays were converted into the percentage activity remaining in the presence and absence of cellobiose and BG, respectively. Values are summarized in Table 6.

[0139] The 4-MUL assay results shown in Table 6 demonstrate that the activity of the wild type T. reesei CBH I was reduced to 23% in the presence of cellobiose, whereas the double mutants at R268 and R411 retained more than 90% of their activity under the same conditions.

[0140] The bagasse assay results shown in Table 6 demonstrate that the activity of the wild type T. reesei CBH I is more significantly impacted by the presence of BG than is the activity of the single or double substitution variants, indicating that the variants are less sensitive to the accumulation of cellobiose than the wild type. FIGS. 4 and 5 show bar graph data for the bagasse assay of wild type T. reesei CBH I vs. the variants. In FIG. 4, bars represent relative activity, normalized to wild type activity in the absence of cellobiose (WT+BG=1). In FIG. 5, bars represent tolerance to cellobiose, as represented by the ratio of activity in the presence of accumulating cellobiose (−BG) to that of activity in the absence of cellobiose (+BG); ratios close to 1 indicate greater tolerance to cellobiose.

### 3. Example 2

### Identification and Characterization of Additional Product Tolerant Variants of CBH I

[0141] 3.1. Materials and Methods

[0142] 3.1.1. Preparation of CBH I Polypeptides for Biochemical Characterization:

[0143] Protein Expression:

[0144] Protein expression was carried out in a strain of Trichoderma reesei in which the native CBH I gene had been knocked out. The strain was transformed with a library of CBH I variant expression constructs that included the hygromycin resistance gene as a selectable marker. Expression constructs contained full-length CBH I wild-type or variant sequences (signal sequence, catalytic domain, linker and carbohydrate binding domain) under the control of a constitutive promoter. Transformants were selected on potato dextrose agar containing hygromycin (50 μg/mL). The selected isolates were subsequently cultured on 96-well plates containing potato dextrose agar without hygromycin. After sporulation, the transformants were stocked in 20% glycerol at −80° C. For screening, transformants were grown in 96-deep-well format for 6 days at 26° C., shaking at 850 rpm in a Multitron II shaker (3 mm throw), in 0.4 mL of liquid medium (2.5 g/L sodium citrate; 5 g/L KH₂PO₄; 2 g/L NH₄NO₃; 0.2 g/L MgSO4.7H₂O; 0.1 g/L CaCl₂; 9.1 g/L soytone; 80 g/L glycerol; 10 g/L MES buffer pH 6; 5 mg/L citric acid; 5 mg/L ZnSO₄.7H₂O; 1 mg/L Fe(NH₄)₂(SO₄)₂; 0.25 mg/L CuSO₄.₅H₂O; 0.05 mg/L MnSO₄; 0.05 mg/L H₃BO₃; 0.05 mg/L Na₂MoO₄.2H₂O; 5 μg/L biotin). Total secreted protein supernatants were harvested by filtration. The knock-out strain alone produced no CBH I protein. Protein concentration was determined by gel densitometry and/or RP-HPLC analysis.

[0145] Protein Quantification by Reverse-Phase (RP) High Performance Liquid chromatography (HPLC):

[0146] CBH I protein concentrations in supernatants were quantified using RP-HPLC. The system used was an Agilent 1100 series model, equipped with quaternary pump (connected to reservoirs A and B, where reservoir A contained water with 0.1% trifluoroacetic acid and reservoir B contained acetonitrile with 0.1% trifluoroacetic acid), a diode array detector (monitored at 225 nm and 280 nm), and a fluorescence detector (monitored at ex/em 280/340 nm). An Agilent Zorbax 300SB-C3 (5 μM, 4.6×150 mm) was used to separate samples using a 20 minute method (30-50% B over 10 minutes; 100% B for 5 minutes; 30% B for 5 min; at 60° C. at a flow rate of 1 mL/min). CBH I was identified by a retention time at 7.8-8.2 minutes and quantitated by area. Concentrations were determined by reference to a standard curve generated with a commercial CBH I (E-CBH I from Megazymes).

[0147] 3.1.2. Biochemical Characterization:

[0148] Methylumbelliferyl Lactoside (4-MUL) Assay:

[0149] CBH I activity on was measured using the 4-MUL assay using gluconolactone to inhibit any BG activity. The fluorogenic 4-MUL substrate (SIGMA) was prepared at 100 mM concentration in DMSO. Assays were run in black 96-well-flat-bottomed plates (Costar) and 4-MU fluorescence was read on a BioTek H4 plate reader (ex/em 365/450 nm). Assay plates were filled with buffer (final concentrations of 100 mM MES, pH 6, 25 mM gluconolactone, with or without cellobiose; cellobiose concentrations are listed with appropriate data sets), to which enzyme mixture was added (10-30 μl, 5 μg/mL final) and then assays were initiated by addition of 4-MUL (0.5 mM final concentration in 100 μl total volume). Enzyme mixtures were either CBH I variants from harvested supernatants or standards. Standards included: a negative control, consisting of harvested supernatant from the CBH I knock-out strain; a positive control, consisting of wild-type CBH I from harvested supernatants; and, a commercial CBH I standard (E-CBHI from Megazymes). Activity standards were run by serial dilution of commercial CBH I from 40 to 0.02 μg/mL and 4-MU (SIGMA, prepared at 20 mM in DMSO) (in dilution increments of 2-fold; all dilutions were made using harvested supernatant from the knock-out control). Kinetic rates were monitored over the first 15 mins following 4-MUL addition; initial rates were calculated based on data in the linear range. After 1 hr, a final endpoint read was taken, both before and after reaction quenching (100 μL of 200 mM Sodium Carbonate, pH 10.0). Activity was calculated for kinetic and endpoint reads; background resulting from the CBH I knock-out supernatant remained negligible. 4MU standard curves and HPLC quantification values were used to calculate specific activity.

[0150] Saccharification Assay:

[0151] CBH I activity on a native lignocellulosic substrate was measured using the saccharification assay. Reactions were run in 96-well plates with the following composition in each well: 22 μL of variant/enzyme sample, 0.7% solids (dilute acid pretreated bagasse at 0.4% cellulose), β-glucosidase (50 ug/mL), and buffer (50 mM Sodium Citrate pH 5.5.), in a final volume of 227 μL. Time points were taken by transferring the reaction solution (15 into another 384-well plate and quenching the reaction with stop buffer (45 μl of 200 mM sodium carbonate, pH 10). Stop plates were sealed and stored at 4° C. for 14 hours before running a secondary BG digest: 15 ul of the stopped reaction into 35 ul of BG mix (50 ug/ml BG, 250 mM Sodium Citrate pH 5.5) and incubated at 37° C. for 14 hr. After the incubation, glucose was quantified by a glucose oxidase detection assay (GO assay), and percent cellulose conversion was calculated (based on 100% conversion at 25 mM) using a standard curve of known glucose concentrations (0.01-3.0 mM).

[0152] Cellobiose Tolerance/Inhibition Assays:

[0153] Tolerance/inhibition values represent activity ratios and/or percent activity remaining/percent activity decreased in the presence versus the absence of cellobiose. Tolerant variants show less inhibition in the presence of cellobiose as compared to wild type, where an activity ratio of 1 (with vs. without a given concentration of cellobiose) is equivalent to 0% inhibition by cellobiose, or 100% tolerance. The effect of cellobiose on CBH I variant performance was monitored by dose-response in the 4MUL assay. Dose-response curves were generated by assaying variant activity in the presence of 6-8 different cellobiose concentrations ranging up to 100 mM cellobiose. CBH I samples were diluted to 5 μg/mL final concentration or were used directly in the case of protein quantification levels below 5 μg/mL. Half maximal inhibitory concentration (IC₅₀) values were determined by plotting 4MUL activity versus cellobiose concentration and fitting with a four parameter dose-response fitting algorithm, with zero activity (or 100% inhibition) constrained to background activity (as established by CBH I knockout values) and with automatic outlier elimination (on GraphPad Prism 5).

[0154] Remazolbrilliant Blue R Stained Carboxymethyl-Cellulose (Azo-CMC) Assay:

[0155] Endoglycosidase activity was measured using the Azo-CMC assay. The colorimetric substrate Azo-CMC was obtained from Megazymes. The substrate was used as provided in solution (4M partially depolymerized and dyed CM-cellulose containing approximately one Remazolbrilliant Blue R dye molecule per 20 sugar residues). Assays were run in clear 96-well-flat-bottomed plates (Costar) and released Remazolbrilliant Blue R was monitored at 590 nm on a BioTek H4 reader. Assay plates were charged with equal volumes (40 uL) of supernatant/standard and Azo-CM-cellulose, incubated 14 h at 35° C., and stopped (200 μL; 80% EtOH, 0.3 M NaOAc, 0.03 M ZnOAc, pH 5.0). After stopping, the reaction plates were centrifuged (4000 rpm, 5 mins), and the clarified supernatant was transferred to a second clear flat bottom plate for absorbance reading. Activity was calibrated using an endoglycosidase standard (20 μg/mL); in all cases, harvested supernatants had activity values below the standard.

[0156] 3.1.3. Library Design, Screening, and Characterization:

[0157] Library Design:

[0158] Example 1 describes CBH I variants that retain activity in the presence of cellobiose levels which are inhibitory to the wild-type enzyme. These cellobiose-tolerant variants were garnered when two arginines found at positions 268 and 411 in the enzyme's product release site were mutagenized to any combination of lysine and alanine. To further characterize single amino acid mutations that contribute to CBH I variants with cellobiose tolerance, a 40-member library was designed to individually mutate position 268 and 411 to each of the 20 naturally occurring amino acids. Additionally, the contribution of double amino acid mutations to CBH I variants with cellobiose tolerance was scanned with a 40-member library introducing each of the 20 amino acids to positions 268 and 411, while the other position was held constant at alanine. The final 80-member library contained: 20 variants with site 268 mutagenized to all possible amino acids (R268aa); 20 variants with site 268 mutagenized to all possible amino acids, and site 411 mutated to alanine (R268aa/R411A); 20 variants with site 411 mutagenized to all possible amino acids (R411 aa); 20 variants s with site 411 mutagenized to all possible amino acids, and site 268 mutated to alanine (R268A/R411aa).

[0159] Transformation and Primary Screening for Active Isolates (Scheme 1 (FIG. 6)):

[0160] The variant library was successfully transformed with the exception of R268A/R411N and R268A/R411Y variants. For the 78 transformed variants, 8 isolates of each were picked, stocked, and grown. Supernatants were harvested for the primary screening by 4-MUL assay (see FIG. 6). Active isolates were identified for 71 out of 78; for R268M, R268Q, R268E/R411A, R268N/R411A, R268T/R411A, R268Y/R411A, and R4111, no active isolate was identified. For these variants, an additional 16 isolates were screened, yielding active isolates for R268N/R411A, R268E/R411A, and R268Y/R411A. Notably, all 20 amino acids at each position were covered either individually or in combination with alanine at the other site.

[0161] Active Variants:

[0162] The harvested protein samples from active isolates were evaluated for CBH I activity, by 4-MUL assay, and CBH I concentration, by HPLC. EG activity was assessed by Azo-CMC assay to verify no background interference. Protein samples were then directly tested in a primary screen for cellobiose tolerance in the 4-MUL assay and for activity on native substrate in the saccharification assay, as shown in FIG. 6. A master re-growth plate was prepared for the 71 active isolates. The plate was used to prepare additional supernatants for secondary screening, wherein dose-response curves were generated and IC₅₀ values were determined using normalized CBH I concentrations wherever possible (FIG. 7).

[0163] Screening by 4-MUL:

[0164] Harvested supernatants from active variant isolates were evaluated for cellobiose tolerance at 1 mM cellobiose in the 4-MUL activity assay. Table 8 lists the tolerance of variants at 1 mM. All non-WT variants demonstrated enhanced tolerance compared with the wild-type enzyme, which is significantly inhibited (% tolerance=6%, or 94% inhibited). Notably, the library contained a wild-type sequence member; this isolate showed consistent behavior with 3% tolerance at 1 mM. Additional cellobiose concentrations at 0.25, 5, 10, 50, and 100 mM were tested leading to full dose-response curves for which half maximal inhibitory concentration (IC₅₀) values were generated (Table 8). The IC₅₀ values support that the variant library has decreased product inhibition, or increased tolerance to cellobiose, when compared to the wild-type enzyme (WT IC₅₀=0.03 mM; see first entry, Table 8).

[0165] Primary Screening by Saccharification:

[0166] In one example, picked mutants were tested using the saccharification assay, which measures the extent to which CBH I converts polymeric cellulose into cellobiose. Saccharification was carried out for 48 hours and the percent of cellulose converted was calculated for each variant. FIG. 8 shows the plot of variant enzyme loading (mg CBH l/g solids) versus percent conversion; the commercial CBH I standard was plotted in serial dilution to generate a standard curve of enzyme loading versus percent conversion. Importantly, this graph shows that the mutant library retains activity on the native substrate and its activity distribution remains near to that of the commercial CBH I standard. Table 8 lists the measured saccharification activity of each variant and also lists expected conversion values based on variant loading as calculated using the commercial CBH I standard curve (% conversion estimated).

[0167] Secondary Screening: IC₅₀ Values:

[0168] In one example, the cellobiose tolerance of the library was explored in more detail by generating dose-response curves and determining half maximal inhibitory concentration (IC₅₀) values, the point at which the enzyme is 50% inhibited. In two instances, IC₅₀ values were generated using samples with CBH I variant protein levels normalized to 5 μg/mL and using cellobiose concentrations in the range of 0.0001-100 mM (Table 9) or in the range of 0.00085-100 mM (Table 10). In another instance, IC₅₀ curves were generated using 30 μl of variant supernatant characterized by CBH I levels lower than 5 μg/mL and using cellobiose concentrations in the range of 0.00085-100 mM (Table 11). FIG. 9 shows representative IC₅₀ data and fitting using Prism (GraphPad). Averaged IC₅₀ values from Tables 8-11 are merged into Table 12 and are graphically presented in FIG. 10.

[0169] 3.2. Results

[0170] Table 5 and FIG. 10 show important trends in the cellobiose IC₅₀ values of the variant library. These data show that both single mutant sites can increase tolerance relative to wild type (average WT IC₅₀=0.05 mM), with mutations at position 411 having a larger impact on increasing tolerance: on average, mutations at position 411 yield an IC₅₀ of 3.2 mM cellobiose, improving tolerance by 70-fold; whereas, mutations at position 268 yield an IC₅₀ of 0.4 mM cellobiose, improving tolerance by 9-fold. The double mutants show even larger increases over the wild type: with 268aa/411A mutants having an averaged IC₅₀ value of 11 mM cellobiose, or 230-fold improved tolerance; and 268A/411aa mutants having an averaged IC₅₀ value of 15 mM cellobiose, or 335-fold improved tolerance. Moreover, the average cellobiose tolerance increase for the double mutant is 4- to 7-fold higher than what would be expected from the additive effect of each single mutation measurement, demonstrating the apparent synergy of double mutations; see columns in Table 12 for measured IC₅₀, expected IC₅₀ (additive values), and synergy (fold-increase of measured over expected). As an example, a single mutations of 268N and 411A were respectively measured to be 0.49 and 1.17 each, giving an expected additive increase of 1.66 for the double mutant 268N/411A; the measured IC₅₀ value 268N/411A is 8-fold higher at 13.28. FIG. 9 shows the IC₅₀ curve shifts of single and synergistic double mutations for serine variants.

[0171] The specific activity (SA) of the variant library was evaluated in a secondary 4-MUL assay. Table 13 lists the specific activity for the variant library and FIG. 11 shows a graphical representation. These data show that the specific activity of variants is increased when mutations are introduced at position 268. On average, a mutation at position 268 increases the specific activity by 2.5 fold over that of wild type. A mutation at 268 in combination with 411 is around 1.5-1.6 fold higher than wild-type, on average. FIG. 9 shows these trends in specific activity for the serine variants, as represented by the higher relative fluorescence units for variants having the 268 mutation in the uninhibited zone of the IC₅₀ curves (low cellobiose concentrations, far left of curve).

### 4. Specific Embodiments and Incorporation by Reference

[0172] All publications, patents, patent applications and other documents cited in this application are hereby incorporated by reference in their entireties for all purposes to the same extent as if each individual publication, patent, patent application or other document were individually indicated to be incorporated by reference for all purposes.

[0173] While various specific embodiments have been illustrated and described, it will be appreciated that various changes can be made without departing from the spirit and scope of the invention(s).

TABLE 1

| Sequence | Database | | |
|---|---|---|---|
| Identifier | Accession | | |
| (SEQ ID NO:) | Number | Species of Origin | Amino acid sequence |
| SEQ ID NO: 1 | BD29555* | Unknown | MSALNSFNMY KSALILGSLL ATAGAQQIGT YTAETHPSLS WSTCKSGGSC TTNSGAITLD ANWRWVHGVN TSTNCYTGNT |
| | | | WNTAICDTDA SCAQDCALDG ADYSGTYGIT TSGNSLRLNF VTGSNVGSRT YLMADNTHYQ IFDLLNQEFT FTVDVSHLPC |
| | | | GLNGALYFVT MDADGGVSKY PNNKAGAQYG VGYCDSQCPR DLKFIAGQAN VEGWTPSSNN ANTGLGNHGA CCAELDIWEA |
| | | | NSISEALTPH PCDTPGLSVC TTDACGGTYS SDRYAGTCDP DGCDFNPYRL GVTDFYGSGK TVDTTKPITV VTQFVTDDGT |
| | | | STGTLSEIRR YYVQNGVVIP QPSSKISGVS GNVINSDFCD AEISTFGETA SFSKHGGLAK MGAGMEAGMV LVMSLWDDYS |
| | | | VNMLWLDSTY PTNATGTPGA ARGSCPTTSG DPKTVESQSG SSYVTFSDIR VGPFNSTFSG GSSTGGSSTT TASGTTTTKA |
| | | | SSTSTSSTST GTGVAAHWGQ CGGQGWTGPT TCASGTTCTV VNPYYSQCL |
| SEQ ID NO: 2 | 340514556 | Trichoderma | MYRKLAVISA FLATARAQSA CTLQSETHPP LTWQKCSSGG TCTQQTGSVV IDANWRWTHA TNSSTNCYDG NTWSSTLCPD |
| | | reesei | NETCAKNCCL DGAAYASTYG VTTSGNSLSI GFVTQSAQKN VGARLYLMAS DTTYQEFTLL GNEFSFDVDV SQLPCGLNGA |
| | | | LYFVSMDADG GVSKYPTNTA GAKYGTGYCD SQCPRDLKFI NGQANVEGWE PSSNNANTGI GGHGSCCSEM DIWEANSISE |
| | | | ALTPHPCTTV GQEICEGDGC GGTYSDNRYG GTCDPDGCDW NPYRLGNTSF YGPGSSFTLD TTKKLTVVTQ FETSGAINRY |
| | | | YVQNGVTFQQ PNAELGSYSG NELNDDYCTA EEAEFGGSSF SDKGGLTQFK KATSGGMVLV MSLWDDYYAN MLWLDSTYPT |
| | | | NETSSTPGAV RGSCSTSSGV PAQVESQSPN AKVTFSNIKF GPIGSTGNPS GGNPPGGNPP GTTTTRRPAT TTGSSPGPTQ |
| | | | SHYGQCGGIG YSGPTVCASG TTCQVLNPYY SQCL |
| SEQ ID NO: 3 | 51243029 | Penicillium | MSALNSFNMY KSALILGSLL ATAGAQQIGT YTAETHPSLS WSTCKSGGSC TTNSGAITLD ANWRWVHGVN TSTNCYTGNT |
| | | occitanis | WNSAICDTDA SCAQDCALDG ADYSGTYGIT TSGNSLRLNF VTGSNVGSRT YLMADNTHYQ IFDLLNQEFT FTVDVSHLPC |
| | | | GLNGALYFVT MDADGGVSKY PNNKAGAQYG VGYCDSQCPR DLKFIAGQAN VEGWTPSANN ANTGIGNHGA CCAELDIWEA |
| | | | NSISEALTPH PCDTPGLSVC TTDACGGTYS SDRYAGTCDP DGCDFNPYRL GVTDFYGSGK TVDTTKPFTV VTQFVTNDGT |
| | | | STGSLSEIRR YYVQNGVVIP QPSSKISGIS GNVINSDYCA AEISTFGGTA SFNKHGGLTN MAAGMEAGMV LVMSLWDDYA |
| | | | VNMLWLDSTY PTNATGTPGA ARGTCATTSG DPKTVESQSG SSYVTFSDIR VGPFNSTFSG GSSTGGSTTT TASRTTTTSA |
| | | | SSTSTSSTST GTGVAGHWGQ CGGQGWTGPT TCVSGTTCTV VNPYYSQCL |
| SEQ ID NO: 4 | 7cel (PDB) & | Trichoderma | ESACTLQSET HPPLTWQKCS SGGTCTQQTG SVVIDANWRW THATNSSTNC YDGNTWSSTL CPDNETCAKN CCLDGAAYAS |
| | | reesei | TYGVTTSGNS LSIDFVTQSA QKNVGARLYL MASDTTYQEF TLLGNEFSFD VDVSQLPCGL NGALYFVSMD ADGGVSKYPT |
| | | | NTAGAKYGTG YCDSQCPRDL KFINGQANVE GWEPSSNNAN TGIGGHGSCC SEMDIWQANS ISEALTPHPC TTVGQEICEG |
| | | | DGCGGTYSDN RYGGTCDPDG CDWNPYRLGN TSFYGPGSSF TLDTTKKLTV VTQFETSGAI NRYYVQNGVT FQQPNAELGS |
| | | | YSGNELNDDY CTAEEAEFGG SSFSDKGGLT QFKKATSGGM VLVMSLWDDY YANMLWLDST YPTNETSSTP GAVRGSCSTS |
| | | | SGVPAQVESQ SPNAKVTFSN IKFGPIGSTG NPSG |
| SEQ ID NO: 5 | 67516425 | Aspergillus | MASSFQLYKA LLFFSSLLSA VQAQKVGTQQ AEVHPGLTWQ TCTSSGSCTT VNGEVTIDAN WRWLHTVNGY TNCYTGNEWD |
| | | nidulans FGSC A4 | TSICTSNEVC AEQCAVDGAN YASTYGITTS GSSLRLNFVT QSQQKNIGSR VYLMDDEDTY TMFYLLNKEF TFDVDVSELP |
| | | | CGLNGAVYFV SMDADGGKSR YATNEAGAKY GTGYCDSQCP RDLKFINGVA NVEGWESSDT NPNGGVGNHG SCCAEMDIWE |
| | | | ANSISTAFTP HPCDTPGQTL CTGDSCGGTY SNDRYGGTCD PDGCDFNSYR QGNKTFYGPG LTVDTNSPVT VVTQFLTDDN |
| | | | TDTGTLSEIK RFYVQNGVVI PNSESTYPAN PGNSITTEFC ESQKELFGDV DVFSAHGGMA GMGAALEQGM VLVLSLWDDN |
| | | | YSNMLWLDSN YPTDADPTQP GIARGTCPTD SGVPSEVEAQ YPNAYVVYSN IKFGPIGSTF GNGGGSGPTT TVTTSTATST |
| | | | TSSATSTATG QAQHWEQCGG NGWTGPTVCA SPWACTVVNS WYSQCL |
| SEQ ID NO: 6 | 46107376 | Gibberella zeae | MYRAIATASA LIAAVRAQQV CSLTQESKPS LNWSKCTSSG CSNVKGSVTI DANWRWTHQV SGSTNCYTGN KWDTSVCTSG |
| | | PH-1 | KVCAEKCCLD GADYASTYGI TSSGDQLSLS FVTKGPYSTN IGSRTYLMED ENTYQMFQLL GNEFTFDVDV SNIGCGLNGA |
| | | | LYFVSMDADG GKAKYPGNKA GAKYGTGYCD AQCPRDVKFI NGQANSDGWQ PSDSDVNGGI GNLGTCCPEM DIWEANSIST |
| | | | AYTPHPCTKL TQHSCTGDSC GGTYSNDRYG GTCDADGCDF NSYRQGNKTF YGPGSGFNVD TTKKVTVVTQ FHKGSNGRLS |
| | | | EITRLYVQNG KVIANSESKI AGVPGNSLTA DFCTKQKKVF NDPDDFTKKG AWSGMSDALE APMVLVMSLW HDHHSNMLWL |
| | | | DSTYPTDSTK LGSQRGSCST SSGVPADLEK NVPNSKVAFS NIKFGPIGST YKSDGTTPTN PTNPSEPSNT ANPNPGTVDQ |
| | | | WGQCGGSNYS GPTACKSGFT CKKINDFYSQ CQ |
| SEQ ID NO: 7 | 70992391 | Aspergillus | MLASTFSYRM YKTALILAAL LGSGQAQQVG TSQAEVHPSM TWQSCTAGGS CTTNNGKVVI DANWRWVHKV GDYTNCYTGN |
| | | fumigatus Af293 | TWDTTICPDD ATCASNCALE GANYESTYGV TASGNSLRLN FVTTSQQKNI GSRLYMMKDD STYEMFKLLN QEFTFDVDVS |
| | | | NLPCGLNGAL YFVAMDADGG MSKYPTNKAG AKYGTGYCDS QCPRDLKFIN GQANVEGWQP SSNDANAGTG NHGSCCAEMD |
| | | | IWEANSISTA FTPHPCDTPG QVMCTGDACG GTYSSDRYGG TCDPDGCDFN SFRQGNKTFY GPGMTVDTKS KFTVVTQFIT |
| | | | DDGTSSGTLK EIKRFYVQNG KVIPNSESTW TGVSGNSITT EYCTAQKSLF QDQNVFEKHG GLEGMGAALA QGMVLVMSLW |
| | | | DDHSANMLWL DSNYPTTASS TTPGVARGTC DISSGVPADV EANHPDAYVV YSNIKVGPIG STFNSGGSNP GGGTTTTTTT |
| | | | QPTTTTTTAG NPGGTGVAQH YGQCGGIGWT GPTTCASPYT CQKLNDYYSQ CL |
| SEQ ID NO: 8 | 121699984 | Aspergillus | MLPSTISYRI YKNALFFAAL FGAVQAQKVG TSKAEVHPSM AWQTCAADGT CTTKNGKVVI DANWRWVHDV KGYTNCYTGN |
| | | clavatus NRRL 1 | TWNAELCPDN ESCAENCALE GADYAATYGA TTSGNALSLK FVTQSQQKNI GSRLYMMKDD NTYETFKLLN QEFTFDVDVS |
| | | | NLPCGLNGAL YFVSMDADGG LSRYTGNEAG AKYGTGYCDS QCPRDLKFIN GLANVEGWTP SSSDANAGNG GHGSCCAEMD |
| | | | IWEANSISTA YTPHPCDTPG QAMCNGDSCG GTYSSDRYGG TCDPDGCDFN SYRQGNKSFY GPGMTVDTKK KMTVVTQFLT |
| | | | NDGTATGTLS EIKRFYVQDG KVIANSESTW PNLGGNSLTN DFCKAQKTVF GDMDTFSKHG GMEGMGAALA EGMVLVMSLW |
| | | | DDHNSNMLWL DSNSPTTGTS TTPGVARGSC DISSGDPKDL EANHPDASVV YSNIKVGPIG STFNSGGSNP GGSTTTTKPA |
| | | | TSTTTTKATT TATTNTTGPT GTGVAQPWAQ CGGIGYSGPT QCAAPYTCTK QNDYYSQCL |
| SEQ ID NO: 9 | 1906845 | Claviceps | MHPSLQTILL SALFTTAHAQ QACSSKPETH PPLSWSRCSR SGCRSVQGAV TVDANWLWTT VDGSQNCYTG NRWDTSICSS |
| | | purpurea | EKTCSESCCI DGADYAGTYG VTTTGDALSL KFVQQGPYSK NVGSRLYLMK DESRYEMFTL LGNEFTFDVD VSKLGCGLNG |
| | | | ALYFVSMDED GGMKRFPMNK AGAKFGTGYC DSQCPRDVKF INGMANSKDW IPSKSDANAG IGSLGACCRE MDIWEANNIA |
| | | | SAFTPHPCKN SAYHSCTGDG CGGTYSKNRY SGDCDPDGCD FNSYRLGNTT FYGPGPKFTI DTTRKISVVT QFLKGRDGSL |
| | | | REIKRFYVQN GKVIPNSVSR VRGVPGNSIT QGFCNAQKKM FGAHESFNAK GGMKGMSAAV SKPMVLVMSL WDDHNSNMLW |
| | | | LDSTYPTNSR QRGSKRGSCP ASSGRPTDVE SSAPDSTVVF SNIKFGPIGS TFSRGK |
| SEQ ID NO: 10 | 1gpi (PDB) & | Phanerochaete | EQAGTNTAEN HPQLQSQQCT TSGGCKPLST KVVLDSNWRW VHSTSGYTNC YTGNEWDTSL CPDGKTCAAN CALDGADYSG |
| | | chrysosporium | TYGITSTGTA LTLKFVTGSN VGSRVYLMAD DTHYQLLKLL NQEFTFDVDM SNLPCGLNGA LYLSAMDADG GMSKYPGNKA |
| | | | GAKYGTGYCD SQCPKDIKFI NGEANVGNWT ETGSNTGTGS YGTCCSEMDI WEANNDAAAF TPHPCTTTGQ TRCSGDDCAR |
| | | | NTGLCDGDGC DFNSFRMGDK TFLGKGMTVD TSKPFTVVTQ FLTNDNTSTG TLSEIRRIYI QNGKVIQNSV ANIPGVDPVN |
| | | | SITDNFCAQQ KTAFGDTNWF AQKGGLKQMG EALGNGMVLA LSIWDDHAAN MLWLDSDYPT DKDPSAPGVA RGTCATTSGV |
| | | | PSDVESQVPN SQVVFSNIKF GDIGSTFSGT S |
| SEQ ID NO: 11 | 119468034 | Neosartorya | MHQRALLFSA LAVAANAQQV GTQKPETHPP LTWQKCTAAG SCSQQSGSVV IDANWRWLHS TKDTTNCYTG NTWNTELCPD |
| | | fischeri NRRL 181 | NESCAQNCAV DGADYAGTYG VTTSGSELKL SFVTGANVGS RLYLMQDDET YQHFNLLNNE FTFDVDVSNL PCGLNGALYF |
| | | | VAMDADGGMS KYPSNKAGAK YGTGYCDSQC PRDLKFINGM ANVEGWKPSS NDKNAGVGGH GSCCPEMDIW EANSISTAVT |
| | | | PHPCDDVSQT MCSGDACGGT YSATRYAGTC DPDGCDFNPF RMGNESFYGP GKIVDTKSEM TVVTQFITAD GTDTGALSEI |
| | | | KRLYVQNGKV IANSVSNVAD VSGNSISSDF CTAQKKAFGD EDIFAKHGGL SGMGKALSEM VLIMSIWDDH HSSMMWLDST |
| | | | YPTDADPSKP GVARGTCEHG AGDPEKVESQ HPDASVTFSN IKFGPIGSTY KA |
| SEQ ID NO: 12 | 7804883 | Leptosphaeria | MYRSLIFATS LLSLAKGQLV GNLYCKGSCT AKNGKVVIDA NWRWLHVKGG YTNCYTGNEW NATACPDNKS CATNCAIDGA |
| | | maculans | DYRRLRHYCE RQLLGTEVHH QGLYSTNIGS RTYLMQDDST YQLFKFTGSQ EFTFDVDLSN LPCGLNGALY FVSMDADGGL |
| | | | KKYPTNKAGA KYGTGYCDAQ CPRDLKFING EGNVEGWQPS KNDQNAGVGG HGSCCAEMDI WEANSVSTAV TPHSCSTIEQ |
| | | | SRCDGDGCGG TYSADRYAGV CDPDGCDFNS YRMGVKDFYG KGKTVDTSKK FTVVTQFIGS GDAMEIKRFY VQNGKTIPQP |
| | | | DSTIPGVTGN SITTFFCDAQ KKAFGDKYTF KDKGGMANMP STCNGMVLVM SLWDDHYSNM LWLDSTYPTD KNPDTDAGSG |
| | | | RGECAITSGV PADVESQHPD ASVIYSNIKF GPINTTFG |
| SEQ ID NO: 13 | 85108032 | Neurospora crassa | MLAKFAALAA LVASANAQAV CSLTAETHPS LNWSKCTSSG CTNVAGSITV DANWRWTHIT SGSTNCYSGN EWDTSLCSTN |
| | | N150(OR74A) | TDCATKCCVD GAEYSSTYGI QTSGNSLSLQ FVTKGSYSTN IGSRTYLMNG ADAYQGFELL GNEFTFDVDV SGTGCGLNGA |
| | | | LYFVSMDLDG GKAKYTNNKA GAKYGTGYCD AQCPRDLKYI NGIANVEGWT PSTNDANAGI GDHGTCCSEM DIWEANKVST |
| | | | AFTPHPCTTI EQHMCEGDSC GGTYSDDRYG GTCDADGCDF NSYRMGNTTF YGEGKTVDTS SKFTVVTQFI KDSAGDLAEI |
| | | | KRFYVQNGKV IENSQSNVDG VSGNSITQSF CNAQKTAFGD IDDFNKKGGL KQMGKALAKP MVLVMSIWDD HAANMLWLDS |
| | | | TYPVEGGPGA YRGECPTTSG VPAEVEANAP NSKVIFSNIK FGPIGSTFSG GSSGTPPSNP SSSVKPVTST AKPSSTSTAS |
| | | | NPSGTGAAHW AQCGGIGFSG PTTCQSPYTC QKINDYYSQC V |
| SEQ ID NO: 14 | 169859458 | Coprinopsis | MFKKVALTAL CFLAVAQAQQ VGREVAENHP RLPWQRCTRN GGCQTVSNGQ VVLDANWRWL HVTDGYTNCY TGNSWNSTVC |
| | | cinerea okayama | SDPTTCAQRC ALEGANYQQT YGITTNGDAL TIKFLTRSQQ TNVGARVYLM ENENRYQMFN LLNKEFTFDV DVSKVPCGIN |
| | | | GALYFIQMDA DGGMSKQPNN RAGAKYGTGY CDSQCPRDIK FIDGVANSAD WTPSETDPNA GRGRYGICCA EMDIWEANSI |
| | | | SNAYTPHPCR TQNDGGYQRC EGRDCNQPRY EGLCDPDGCD YNPFRMGNKD FYGPGKTVDT NRKMTVVTQF ITHDNTDTGT |
| | | | LVDIRRLYVQ DGRVIANPPT NFPGLMPAHD SITEQFCTDQ KNLFGDYSSF ARDGGLAHMG RSLAKGHVLA LSIWNDHGAH |
| | | | MLWLDSNYPT DADPNKPGIA RGTCPTTGGT PRETEQNHPD AQVIFSNIKF GDIGSTFSGY |
| SEQ ID NO: 15 | 154292161 | Botryotinia | MYSAAVLATF SFLLGAGAQQ VGTSTAETHP ALTVQKCAAG GTCTDESDSI VLDANWRWLH STSGSTNCYT GNTWDTTLCP |
| | | fuckeliana B05-10 | DAATCTTNCA LDGADYEGTY GITTSGDSLK LSFVTGSNVG SRTYLMDSET TYKEFALLGN EFTFTVDVSK LPCGLNGALY |
| | | | FVPMDADGGM SKYPTNKAGA KYGTGYCDAQ CPQDMKFVNG TANVEGWVPD SNSANSGTGN IGSCCSEFDV WEANSMSQAL |
| | | | TPHVCTVDSQ TACTGDDCAS NTGVCDGDGC DFNPYRMGNT TFYGSGMTID TSKPFSVVTQ FITDDGTETG TLTEIKRFYV |
| | | | QDDVVYEQPS SDISGVSGNS ITDDFCAAQK TAFGDTDYFT QNGGMAAMGK KMADGMVLVL SIWDDYNVNM LWLDSDYPTT |
| | | | KDASTPGVSR GSCATDSGVP ATVEAASGSA YVTFSSIKYG PIGSTFNAPA DSSSSVSASS SPAPIASSSS SASIAPVSSV |
| | | | VAAIVSSSAQ AISSAAPVVS SSAQAISSAA PVVSSVVSSA APVATSSTKS KCSKVSSTLK TSVAAPATSA TSAAVVATSS |
| | | | AASSTGSVPL YGNCTGGKTC SEGTCVVQND YYSQCVASS |
| SEQ ID NO: 16 | 169615761 # | Phaeosphaeria | MTWQRCTGTG GSSCTNVNGE IVIDANWRWI HATGGYTNCF DGNEWNKTAC PSNAACTKNC AIEGSDYRGT YGITTSGNSL |
| | | nodorum SN15 | TLKFITKGQY STNVGSRTYL MKDTNNYEMF NLIGNEFTFD VDLSQLPCGL NGALYFVSMP EKGQGTPGAK YGTGKLSQCS |
| | | | VHISKTLTDA CARDLKFVGG EANADGWQAS TSDPNAGVGK KGACCAEMDV WEANSMSTAL TPHSCQPEGY AVCEESNCGG |
| | | | TYSLDRYAGT CDANGCDFNP YRVGNKDFYG KGKTVDTSKK MTVVTQFLGT GSDLTELKRF YVQDGKVISN PEPTIPGMTG |
| | | | NSITQKWCDT QKEVFKEEVY PFNQWGGMAS MGKGMAQGMV LVMSLWDDHY SNMLWLDSTY PTDRDPESPG AARGECAITS |
| | | | GAPAEVEANN PDASVMFSNI KFGPIGSTFQ QPA |
| SEQ ID NO: 17 | 4883502 | Humicola grisea | MQIKSYIQYL AAALPLLSSV AAQQAGTITA ENHPRMTWKR CSGPGNCQTV QGEVVIDANW RWLHNNGQNC YEGNKWTSQC |
| | | | SSATDCAQRC ALDGANYQST YGASTSGDSL TLKFVTKHEY GTNIGSRFYL MANQNKYQMF TLMNNEFAFD VDLSKVECGI |
| | | | NSALYFVAME EDGGMASYPS NRAGAKYGTG YCDAQCARDL KFIGGKANIE GWRPSTNDPN AGVGPMGACC AEIDVWESNA |
| | | | YAYAFTPHAC GSKNRYHICE TNNCGGTYSD DRFAGYCDAN GCDYNPYRMG NKDFYGKGKT VDTNRKFTVV SRFERNRLSQ |
| | | | FFVQDGRKIE VPPPTWPGLP NSADITPELC DAQFRVFDDR NRFAETGGFD ALNEALTIPM VLVMSIWDDH HSNMLWLDSS |
| | | | YPPEKAGLPG GDRGPCPTTS GVPAEVEAQY PNAQVVWSNI RFGPIGSTVN V |
| SEQ ID NO: 18 | 950686 | Humicola grisea | MRTAKFATLA ALVASAAAQQ ACSLTTERHP SLSWKKCTAG GQCQTVQASI TLDSNWRWTH QVSGSTNCYT GNKWDTSICT |
| | | | DAKSCAQNCC VDGADYTSTY GITTNGDSLS LKFVTKGQYS TNVGSRTYLM DGEDKYQTFE LLGNEFTFDV DVSNIGCGLN |
| | | | GALYFVSMDA DGGLSRYPGN KAGAKYGTGY CDAQCPRDIK FINGEANIEG WTGSTNDPNA GAGRYGTCCS EMDIWEANNM |
| | | | ATAFTPHPCT IIGQSRCEGD SCGGTYSNER YAGVCDPDGC DFNSYRQGNK TFYGKGMTVD TTKKITVVTQ FLKDANGDLG |
| | | | EIKRFYVQDG KIIPNSESTI PGVEGNSITQ DWCDRQKVAF GDIDDFNRKG GMKQMGKALA GPMVLVMSIW DDHASNMLWL |
| | | | DSTFPVDAAG KPGAERGACP TTSGVPAEVE AEAPNSNVVF SNIRFGPIGS TVAGLPGAGN GGNNGGNPPP PTTTTSSAPA |
| | | | TTTTASAGPK AGRWQQCGGI GFTGPTQCEE PYTCTKLNDW YSQCL |
| SEQ ID NO: 19 | 124491660 | Chaetomium | MQIKQYLQYL AAALPLVNMA AAQRAGTQQT ETHPRLSWKR CSSGGNCQTV NAEIVIDANW RWLHDSNYQN CYDGNRWTSA |
| | | thermophilum | CSSATDCAQK CYLEGANYGS TYGVSTSGDA LTLKFVTKHE YGTNIGSRVY LMNGSDKYQM FTLMNNEFAF DVDLSKVECG |
| | | | LNSALYFVAM EEDGGMRSYS SNKAGAKYGT GYCDAQCARD LKFVGGKANI EGWRPSTNDA NAGVGPYGAC CAEIDVWESN |
| | | | AYAFAFTPHG CLNNNYHVCE TSNCGGTYSE DRFGGLCDAN GCDYNPYRMG NKDFYGKGKT VDTSRKFTVV TRFEENKLTQ |
| | | | FFIQDGRKID IPPPTWPGLP NSSAITPELC TNLSKVFDDR DRYEETGGFR TINEALRIPM VLVMSIWDGH YANMLWLDSV |
| | | | YPPEKAGQPG AERGPCAPTS GVPAEVEAQF PNAQVIWSNI RFGPIGSTYQ V |
| SEQ ID NO: 20 | 58045187 | Chaetomium | MMYKKFAALA ALVAGAAAQQ ACSLTTETHP RLTWKRCTSG GNCSTVNGAV TIDANWRWTH TVSGSTNCYT GNEWDTSICS |
| | | thermophilum | DGKSCAQTCC VDGADYSSTY GITTSGDSLN LKFVTKHQHG TNVGSRVYLM ENDTKYQMFE LLGNEFTFDV DVSNLGCGLN |
| | | | GALYFVSMDA DGGMSKYSGN KAGAKYGTGY CDAQCPRDLK FINGEANIEN WTPSTNDANA GFGRYGSCCS EMDIWDANNM |
| | | | ATAFTPHPCT IIGQSRCEGN SCGGTYSSER YAGVCDPDGC DFNAYRQGDK TFYGKGMTVD TTKKMTVVTQ FHKNSAGVLS |
| | | | EIKRFYVQDG KIIANAESKI PGNPGNSITQ EWCDAQKVAF GDIDDFNRKG GMAQMSKALE GPMVLVMSVW DDHYANMLWL |
| | | | DSTYPIDKAG TPGAERGACP TTSGVPAEIE AQVPNSNVIF SNIRFGPIGS TVPGLDGSTP SNPTATVAPP TSTTTSVRSS |
| | | | TTQISTPTSQ PGGCTTQKWG QCGGIGYTGC TNCVAGTTCT ELNPWYSQCL |
| SEQ ID NO: 21 | 169601100 # | Phaeosphaeria | MYRNFLYAAS LLSVARSQLV GTQTTETHPG MTWQSCTAKG SCTTCSDNKA CASNCAVDGA DYKGTYGITA SGNSLQLKFI |
| | | nodorum SN15 | TKGSYSTNIG SRTYLMASDT AYQMFKFDGN KEFTFDVDLS GLPCGFNGAL YFVSMDEDGG LKKYSGNKAG AKYGTGYCDA |
| | | | QCPRDLKFIN GEGNVEGWKP SDNDANAGVG GHGSCCAEMD IWEANSISTA VTPHACSTIE QTRCDGDGCG GTYSADRYAG |
| | | | VCDPDGCDFN AYRMGVKNFY GKGMTVDTSK KFTVVTQFIG TGDAMEIKRF YVQGGKTIEQ PASTIPGVEG NSITTKFCDQ |
| | | | QKQVFGDRYT YKEKGGTANM AKALAQGMVL VMSLWDDHYS NMLWLDSTYP TDKNPDTDLG SGRGSCDVKS GAPADVESKS |
| | | | PDATVIYSNI KFGPLNSTY |
| SEQ ID NO: 22 | 169870197 | Coprinopsis | MLGKIAIASL SFLAIAKGQQ VGREVAENHP RLPWQRCTRN GGCQTVSNGQ VVLDANWRWL HVTDGYTNCY TGNSWNSSVC |
| | | cinerea Okayama | SDGTTCAQRC ALEGANYQQT YGITTSGNSL TMKFLTRSQG TNVGGRVYLM ENENRYQMFN LLNKEFTFDV DVSKVPCGIN |
| | | | GALYFIQMDA DGGMSSQPNN RAGAKYGTGY CDSQCPRDIK FIDGVANSVG WEPSETDSNA GRGRYGICCA EMDIWEANSI |
| | | | SNAYTPHPCR TQNDGGYQRC EGRDCNQPRY EGLCDPDGCD YNPFRMGNKD FYGPGKTIDT NRKMTVVTQF ITHDNTDTGT |
| | | | LVDIRRLYVQ DGRVIANPPT NFPGLMPAHD SITEQFCTDQ KNLFGDYSSF ARDGGLAHMG RSLAKGHVLA LSIWNDHGAH |
| | | | MLWLDSNYPT DADPNKPGIA RGTCPTTGGT PRETEQNHPD AQVIFSNIKF GDIGSTFSGY |
| SEQ ID NO: 23 | 3913806 | Agaricus bisporus | MFPRSILLAL SLTAVALGQQ VGTNMAENHP SLTWQRCTSS GCQNVNGKVT LDANWRWTHR INDFTNCYTG NEWDTSICPD |
| | | | GVTCAENCAL DGADYAGTYG VTSSGTALTL KFVTESQQKN IGSRLYLMAD DSNYEIFNLL NKEFTFDVDV SKLPCGLNGA |
| | | | LYFSEMAADG GMSSTNTAGA KYGTGYCDSQ CPRDIKFIDG EANSEGWEGS PNDVNAGTGN FGACCGEMDI WEANSISSAY |
| | | | TPHPCREPGL QRCEGNTCSV NDRYATECDP DGCDFNSFRM GDKSFYGPGM TVDTNQPITV VTQFITDNGS DNGNLQEIRR |
| | | | IYVQNGQVIQ NSNVNIPGID SGNSISAEFC DQAKEAFGDE RSFQDRGGLS GMGSALDRGM VLVLSIWDDH AVNMLWLDSD |
| | | | YPLDASPSQP GISRGTCSRD SGKPEDVEAN AGGVQVVYSN IKFGDINSTF NNNGGGGGNP SPTTTRPNSP AQTMWGQCGG |
| | | | QGWTGPTACQ SPSTCHVIND FYSQCF |
| SEQ ID NO: 24 | 169611094 | Phaeosphaeria | MYRNLALASL SLFGAARAQQ AGTVTTETHP SLSWKTCTGT GGTSCTTKAG KITLDANWRW THVTTGYTNC YDGNSWNTTA |
| | | nodorum SN15 | CPDGATCTKN CAVDGADYSG TYGITTSSNS LSIKFVTKGS NSANIGSRTY LMESDTKYQM FNLIGQEFTF DVDVSKLPCG |
| | | | LNGALYFVEM AADGGIGKGN NKAGAKYGTG YCDSQCPHDI KFINGKANVE GWNPSDADPN AGSGKIGACC PEMDIWEANS |
| | | | ISTAYTPHPC KGTGLQECTD DVSCGDGSNR YSGLCDKDGC DFNSYRMGVK DFYGPGATLD TTKKMTVVTQ FLGSGSTLSE |
| | | | IKRFYVQNGK VFKNSDSAIE GVTGNSITES FCAAQKTAFG DTNSFKTLGG LNEMGASLAR GHVLVMSLWD DHAVNMLWLD |
| | | | STYPTNSTKL GAQRGTCAID SGKPEDVEKN HPDATVVFSD IKFGPIGSTF QQPS |
| SEQ ID NO: 25 | 3131 | Phanerochaete | MVDIQIATFL LLGVVGVAAQ QVGTYIPENH PLLATQSCTA SGGCTTSSSK IVLDANRRWI HSTLGTTSCL TANGWDPTLC |
| | | chrysosporium | PDGITCANYC ALDGVSYSST YGITTSGSAL RLQFVTGTNI GSRVFLMADD THYRTFQLLN QELAFDVDVS KLPCGLNGAL |
| | | | YFVAMDADGG KSKYPGNRAG AKYGTGYCDS QCPRDVQFIN GQANVQGWNA TSATTGTGSY GSCCTELDIW EANSNAAALT |
| | | | PHTCTNNAQT RCSGSNCTSN TGFCDADGCD FNSFRLGNTT FLGAGMSVDT TKTFTVVTQF ITSDNTSTGN LTEIRRFYVQ |
| | | | NGNVIPNSVV NVTGIGAVNS ITDPFCSQQK KAFIETNYFA QHGGLAQLGQ ALRTGMVLAF SISDDPANHM LWLDSNFPPS |
| | | | ANPAVPGVAR GMCSITSGNP ADVGILNPSP YVSFLNIKFG SIGTTFRPA |
| SEQ ID NO: 26 | 70991503 | Aspergillus | MHQRALLFSA LAVAANAQQV GTQTPETHPP LTWQKCTAAG SCSQQSGSVV IDANWRWLHS TKDTTNCYTG NTWNTELCPD |
| | | fumigatus Af293 | NESCAQNCAL DGADYAGTYG VTTSGSELKL SFVTGANVGS RLYLMQDDET YQHFNLLNHE FTFDVDVSNL PCGLNGALYF |
| | | | VAMDADGGMS KYPSNKAGAK YGTGYCDSQC PRDLKFINGM ANVEGWEPSS SDKNAGVGGH GSCCPEMDIW EANSISTAVT |
| | | | PHPCDDVSQT MCSGDACGGT YSESRYAGTC DPDGCDFNPF RMGNESFYGP GKIVDTKSKM TVVTQFITAD GTDSGALSEI |
| | | | KRLYVQNGKV IANSVSNVAG VSGNSITSDF CTAQKKAFGD EDIFAKHGGL SGMGKALSEM VLIMSIWDDH HSSMMWLDST |
| | | | YPTDADPSKP GVARGTCEHG AGDPENVESQ HPDASVTFSN IKFGPIGSTY EG |
| SEQ ID NO: 27 | 294196 | Phanerochaete | MFRTATLLAF TMAAMVFGQQ VGTNTAENHR TLTSQKCTKS GGCSNLNTKI VLDANWRWLH STSGYTNCYT GNQWDATLCP |
| | | chrysosporium | DGKTCAANCA LDGADYTGTY GITASGSSLK LQFVTGSNVG SRVYLMADDT HYQMFQLLNQ EFTFDVDMSN LPCGLNGALY |
| | | | LSAMDADGGM AKYPTNKAGA KYGTGYCDSQ CPRDIKFING EANVEGWNAT SANAGTGNYG TCCTEMDIWE ANNDAAAYTP |
| | | | HPCTTNAQTR CSGSDCTRDT GLCDADGCDF NSFRMGDQTF LGKGLTVDTS KPFTVVTQFI TNDGTSAGTL TEIRRLYVQN |
| | | | GKVIQNSSVK IPGIDPVNSI TDNFCSQQKT AFGDTNYFAQ HGGLKQVGEA LRTGMVLALS IWDDYAANML WLDSNYPTNK |
| | | | DPSTPGVARG TCATTSGVPA QIEAQSPNAY VVFSNIKFGD LNTTYTGTVS SSSVSSSHSS TSTSSSHSSS STPPTQPTGV |
| | | | TVPQWGQCGG IGYTGSTTCA SPYTCHVLNP YYSQCY |
| SEQ ID NO: 28 | 18997123 | Thermoascus | MYQRALLFSF FLAAARAHEA GTVTAENHPS LTWQQCSSGG SCTTQNGKVV IDANWRWVHT TSGYTNCYTG NTWDTSICPD |
| | | aurantiacus | DVTCAQNCAL DGADYSGTYG VTTSGNALRL NFVTQSSGKN IGSRLYLLQD DTTYQIFKLL GQEFTFDVDV SNLPCGLNGA |
| | | | LYFVAMDADG NLSKYPGNKA GAKYGTGYCD SQCPRDLKFI NGQANVEGWQ PSANDPNAGV GNHGSSCAEM DVWEANSIST |
| | | | AVTPHPCDTP GQTMCQGDDC GGTYSSTRYA GTCDPDGCDF NPYQPGNHSF YGPGKIVDTS SKFTVVTQFI TDDGTPSGTL |
| | | | TEIKRFYVQN GKVIPQSEST ISGVTGNSIT TEYCTAQKAA FGDNTGFFTH GGLQKISQAL AQGMVLVMSL WDDHAANMLW |
| | | | LDSTYPTDAD PDTPGVARGT CPTTSGVPAD VESQNPNSYV IYSNIKVGPI NSTFTAN |
| SEQ ID NO: 29 | 4204214 | Humicola grisea | MQIKSYIQYL AAALPLLSSV AAQQAGTITA ENHPRMTWKR CSGPGNCQTV QGEVVIDANW RWLHNNGQNC YEGNKWTSQC |
| | | var thermoidea | SSATDCAQRC ALDGANYQST YGASTSGDSL TLKFVTKHEY GTNIGSRFYL MANQNKYQMF TLMNNEFAFD VDLSKVECGI |
| | | | NSALYFVAME EDGGMASYPS NRAGAKYGTG YCDAQCARDL KFIGGKANIE GWRPSTNDPN AGVGPMGACC AEIDVWESNA |
| | | | YAYAFTPHAC GSKNRYHICE TNNCGGTYSD DRFAGYCDAN GCDYNPYRMG NKDFYGKGKT VDTNRKFTVV SRFERNRLSQ |
| | | | FFVQDGRKIE VPPPTWPGLP NSADITPELC DAQFRVFDDR NRFAETGGFD ALNEALTIPM VLVMSIWDDH HSNMLWLDSS |
| | | | YPPEKAGLPG GDRGPCPTTS GVPAEVEAQY PDAQVVWSNI RFGPIGSTVN V |
| SEQ ID NO: 30 | 34582632 | Trichoderma | MYRKLAVISA FLATARAQSA CTLQSETHPP LTWQKCSSGG TCTQQTGSVV IDANWRWTHA TNSSTNCYDG NTWSSTLCPD |
| | | viride (also known | NETCAKNCCL DGAAYASTYG VTTSGNSLSI GFVTQSAQKN VGARLYLMAS DTTYQEFTLL GNEFSFDVDV SQLPCGLNGA |
| | | as Hypochrea rufa) | LYFVSMDADG GVSKYPTNTA GAKYGTGYCD SQCPRDLKFI NGQANVEGWE PSSNNANTGI GGHGSCCSEM DIWEANSISE |
| | | | ALTPHPCTTV GQEICEGDGC GGTYSDNRYG GTCDPDGCDW DPYRLGNTSF YGPGSSFTLD TTKKLTVVTQ FETSGAINRY |
| | | | YVQNGVTFQQ PNAELGSYSG NGLNDDYCTA EEAEFGGSSF SDKGGLTQFK KATSGGMVLV MSLWDDYYAN MLWLDSTYPT |
| | | | NETSSTPGAV RGSCSTSSGV PAQVESQSPN AKVTFSNIKF GPIGSTGDPS GGNPPGGNPP GTTTTRRPAT TTGSSPGPTQ |
| | | | SHYGQCGGIG YSGPTVCASG TTCQVLNPYY SQCL |
| SEQ ID NO: 31 | 156712284 | Thermoascus | MYQRALLFSF FLAAARAQQA GTVTAENHPS LTWQQCSSGG SCTTQNGKVV IDANWRWVHT TSGYTNCYTG NTWDTSICPD |
| | | aurantiacus | DVTCAQNCAL DGADYSGTYG VTTSGNALRL NFVTQSSGKN IGSRLYLLQD DTTYQIFKLL GQEFTFDVDV SNLPCGLNGA |
| | | | LYFVAMDADG GLSKYPGNKA GAKYGTGYCD SQCPRDLKFI NGQANVEGWQ PSANDPNAGV GNHGSCCAEM DVWEANSIST |
| | | | AVTPHPCDTP GQTMCQGDDC GGTYSSTRYA GTCDPDGCDF NPYRQGNHSF YGPGQIVDTS SKFTVVTQFI TDDGTPSGTL |
| | | | TEIKRFYVQN GKVIPQSEST ISGVTGNSIT TEYCTAQKAA FGDNTGFFTH GGLQKISQAL AQGMVLVMSL WDDHAANMLW |
| | | | LDSTYPTDAD PDTPGVARGT CPTTSGVPAD VESQYPNSYV IYSNIKVGPI NSTFTAN |
| SEQ ID NO: 32 | 39977899 | Magnaporthe | MIRKITTLAA LVGVVRGQAA CSLTAETHPS LTWQKCSSGG SCTNVAGSVT IDANWRWTHT TSGYTNCYTG NKWDTSICST |
| | | grisea (oryzae) 70- | NADCASKCCV DGANYQQTYG ASTSGNALSL QYVTQSSGKN VGSRLYLLES ENKYQMFNLL GNEFTFDVDA SKLGCGLNGA |
| | | 15 | VYFVSMDADG GQSKYSGNKA GAKYGTGYCD SQCPRDLKYI NGAANVEGWQ PSSGDANSGV GNMGSCCAEM DIWEANSIST |
| | | | AYTPHPCSNN AQHSCKGDDC GGTYSSVRYA GDCDPDGCDF NSYRQGNRTF YGPGSNFNVD SSKKVTVVTQ FISSGGQLTD |
| | | | IKRFYVQNGK VIPNSQSTIT GVTGNSVTQD YCDKQKTAFG DQNVFNQRGG LRQMGDALAK GMVLVMSVWD DHHSQMLWLD |
| | | | STYPTTSTAP GAARGSCSTS SGKPSDVQSQ TPGATVVYSN IKFGPIGSTF KSS |
| SEQ ID NO: 33 | 20986705 | Talaromyces | MLRRALLLSS SAILAVKAQQ AGTATAENHP PLTWQECTAP GSCTTQNGAV VLDANWRWVH DVNGYTNCYT GNTWDPTYCP |
| | | emersonii | DDETCAQNCA LDGADYEGTY GVTSSGSSLK LNFVTGSNVG SRLYLLQDDS TYQIFKLLNR EFSFDVDVSN LPCGLNGALY |
| | | | FVAMDADGGV SKYPNNKAGA KYGTGYCDSQ CPRDLKFIDG EANVEGWQPS SNNANTGIGD HGSCCAEMDV WEANSISNAV |
| | | | TPHPCDTPGQ TMCSGDDCGG TYSNDRYAGT CDPDGCDFNP YRMGNTSFYG PGKIIDTTKP FTVVTQFLTD DGTDTGTLSE |
| | | | IKRFYIQNSN VIPQPNSDIS GVTGNSITTE FCTAQKQAFG DTDDFSQHGG LAKMGAAMQQ GMVLVMSLWD DYAAQMLWLD |
| | | | SDYPTDADPT TPGIARGTCP TDSGVPSDVE SQSPNSYVTY SNIKFGPINS TFTAS |
| SEQ ID NO: 34 | 22138843 | Aspergillus oryzae | MHQRALLFSA FWTAVQAQQA GTLTAETHPS LTWQKCAAGG TCTEQKGSVV LDSNWRWLHS VDGSTNCYTG NTWDATLCPD |
| | | | NESCASNCAL DGADYEGTYG VTTSGDALTL QFVTGANIGS RLYLMADDDE SYQTFNLLNN EFTFDVDASK LPCGLNGAVY |
| | | | FVSMDADGGV AKYSTNKAGA KYGTGYCDSQ CPRDLKFING QVRKGWEPSD SDKNAGVGGH GSCCPQMDIW EANSISTAYT |
| | | | PHPCDDTAQT MCEGDTCGGT YSSERYAGTC DPDGCDFNAY RMGNESFYGP SKLVDSSSPV TVVTQFITAD GTDSGALSEI |
| | | | KRFYVQGGKV IANAASNVDG VTGNSITADF CTAQKKAFGD DDIFAQHGGL QGMGNALSSM VLTLSIWDDH HSSMMWLDSS |
| | | | YPEDADATAP GVARGTCEPH AGDPEKVESQ SGSATVTYSN IKYGPIGSTF DAPA |
| SEQ ID NO: 35 | 55775695 | Penicillium | MASTLSFKIY KNALLLAAFL GAAQAQQVGT STAEVHPSLT WQKCTAGGSC TSQSGKVVID SNWRWVHNTG GYTNCYTGND |
| | | chrysogenum | WDRTLCPDDV TCATNCALDG ADYKGTYGVT ASGSSLRLNF VTQASQKNIG SRLYLMADDS KYEMFQLLNQ EFTFDVDVSN |
| | | | LPCGLNGALY FVAMDEDGGM ARYPTNKAGA KYGTGYCDAQ CPRDLKFING QANVEGWEPS SSDVNGGTGN YGSCCAEMDI |
| | | | WEANSISTAF TPHPCDDPAQ TRCTGDSCGG TYSSDRYGGT CDPDGCDFNP YRMGNQSFYG PSKIVDTESP FTVVTQFITN |
| | | | DGTSTGTLSE IKRFYVQNGK VIPQSVSTIS AVTGNSITDS FCSAQKTAFK DTDVFAKHGG MAGMGAGLAE GMVLVMSLWD |
| | | | DHAANMLWLD STYPTSASST TPGAARGSCD ISSGEPSDVE ANHSNAYVVY SNIKVGPLGS TFGSTDSGSG TTTTKVTTTT |
| | | | ATKTTTTTGP STTGAAHYAQ CGGQNWTGPT TCASPYTCQR QGDYYSQCL |
| SEQ ID NO: 36 | 171676762 | Podospora | MVSAKFAALA ALVASASAQQ VCSLTPESHP PLTWQRCSAG GSCTNVAGSV TLDSNWRWTH TLQGSTNCYS GNEWDTSICT |
| | | anserina | TGTKCAQNCC VEGAEYAATY GITTSGNQLN LKFVTEGKYS TNVGSRTYLM ENATKYQGFN LLGNEFTFDV DVSNIGCGLN |
| | | | GALYFVSMDL DGGLAKYSGN KAGAKYGTGY CDAQCPRDIK FINGEANIEG WNPSTNDVNA GAGRYGTCCS EMDIWEANNM |
| | | | ATAYTPHSCT ILDQSRCEGE SCGGTYSSDR YGGVCDPDGC DFNSYRMGNK EFYGKGKTVD TTKKMTVVTQ FLKNAAGELS |
| | | | EIKRFYVQNG VVIPNSVSSI PGVPNQNSIT QDWCDAQKIA FGDPDDNTAK GGLRQMGLAL DKPMVLVMSI WNDHAAHMLW |
| | | | LDSTYPVDAA GRPGAERGAC PTTSGVPSEV EAEAPNSNVA FSNIKFGPIG STFNSGSTNP NPISSSTATT PTSTRVSSTS |
| | | | TAAQTPTSAP GGTVPRWGQC GGQGYTGPTQ CVAPYTCVVS NQWYSQCL |
| SEQ ID NO: 37 | 146350520 | Pleurotus sp | MFPYIALVSF SFLSVVLAQQ VGTLTAETHP QLTVQQCTRG GSCTTQQRSV VLDGNWRWLH STSGSNNCYT GNTWDTSLCP |
| | | Florida | DAATCSRNCA LDGADYSGTY GITSSGNALT LKFVTHGPYS TNIGSRVYLL ADDSHYQMFN LKNKEFTFDV DVSQLPCGLN |
| | | | GALYFSQMDA DGGTGRFPNN KAGAKYGTGY CDSQCPHDIK FINGEANVQG WQPSPNDSNA GKGQYGSCCA EMDIWEANSM |
| | | | ASAYTPHPCT VTTPTRCQGN DCGDGDNRYG GVCDKDGCDF NSFRMGDKNF LGPGKTVNTN SKFTVVTQFL TSDNTTSGTL |
| | | | SEIRRLYVQN GRVIQNSKVN IPGMASTLDS ITESFCSTQK TVFGDTNSFA SKGGLRAMGN AFDKGMVLVL SIWDDHEAKM |
| | | | LWLDSNYPLD KSASAPGVAR GTCATTSGEP KDVESQSPNA QVIFSNIKYG DIGSTYSN |
| SEQ ID NO: 38 | 37732123 | Gibberella zeae | MYRAIATASA LIAAVRAQQV CSLTQESKPS LNWSKCTSSG CSNVKGSVTI DANWRWTHQV SGSTNCYTGN KWDTSVCTSG |
| | | | KVCAERCCLD GADYASTYGI TSSGDQLSLS FVTKGPYSTN IGSRTYLMED ENTYQMFQLL GNEFTFDVDV SNIGCGLNGA |
| | | | LYFVSMDADG GKAKYPGNKA GAKYGTGYCD AQCPRDVKFI NGQANSDGWQ PSDSDVNGGI GNLGTCCPEM DIWEANSIST |
| | | | AYTPHPCTKL TQHSCTGDSC GGTYSNDRYG GTCDADGCDF NSYRQGNKTF YGPGSGFNVD TTKKVTVVTQ FHKGSNGRLS |
| | | | EITRLYVQNG KVIANSESKI AGVPGNSLTA DFCTKQKKVF NDPDDFTKKG AWSGMSDALE APMVLVMSLW HDHHSNMLWL |
| | | | DSTYPTDSTK LGSQRGSCST SSGVPADLEK NVPNSKVAFS NIKFGPIGST YKSDGTTPTN PTNPSEPSNT ANPNPGTVDQ |
| | | | WGQCGGSNYS GPTACKSGFT CKKINDFYSQ CQ |
| SEQ ID NO: 39 | 156055188 | Sclerotinia | MYSAAVLATF SFLLGAGAQQ VGTLKTESHP PLTIQKCAAG GTCTDEADSV VLDANWRWLH STSGSTNCYT GNTWDTTLCP |
| | | sclerotiorum 1980 | DAATCTANCA FDGADYEGTY GITSSGDSLK LSFVTGSNVG SRTYLMDSET TYKEFALLGN EFTFTVDVSK LPCGLNGALY |
| | | | FVPMDADGGM SKYPTNKAGA KYGTGYCDAQ CPQDMKFVSG GANNEGWVPD SNSANSGTGN IGSCCSEFDV WEANSMSQAL |
| | | | TPHTCTVDGQ TACTGDDCAG NTGVCDADGC DFNPYRMGNT TFYGSGKTID TTKPFSVVTQ FITDDGTETG TLTEIKRFYV |
| | | | QDDVVYEQPN SDISGVSGNS ITDDFCTAQK TAFGDTDYFS QKGGMAAMGK KMADGMVLVL SIWDDYNVNM LWLDSDYPTT |
| | | | KDASTPGVSR GSCATTSGVP ATVEAASGSA YVTFSSIKYG PIGSTFKAPA DSSSPVVASS SPAAVAAVVS TSSAQAVPSH |
| | | | PAVSSSQAAV STPEAVSSAP EVPASSSAAQ SVAPTSTKPK CSKVSQSSTL ATSVAAPATT ATSAAVAATS AASSSGSVPL |
| | | | YGNCTGGKTC SEGTCVVQNP WYSQCVASS |
| SEQ ID NO: 40 | 453224 | Phanerochaete | MFRAAALLAF TCLAMVSGQQ AGTNTAENHP QLQSQQCTTS GGCKPLSTKV VLDSNWRWVH STSGYTNCYT GNEWDTSLCP |
| | | chrysosporium | DGKTCAANCA LDGADYSGTY GITSTGTALT LKFVTGSNVG SRVYLMADDT HYQLLKLLNQ EFTFDVDMSN LPCGLNGALY |
| | | | LSAMDADGGM SKYPGNKAGA KYGTGYCDSQ CPKDIKFING EANVGNWTET GSNTGTGSYG TCCSEMDIWE ANNDAAAFTP |
| | | | HPCTTTGQTR CSGDDCARNT GLCDGDGCDF NSFRMGDKTF LGKGMTVDTS KPFTVVTQFL TNDNTSTGTL SEIRRIYIQN |
| | | | GKVIQNSVAN IPGVDPVNSI TDNFCAQQKT AFGDTNWFAQ KGGLKQMGEA LGNGMVLALS IWDDHAANML WLDSDYPTDK |
| | | | DPSAPGVARG TCATTSGVPS DVESQVPNSQ VVFSNIKFGD IGSTFSGTSS PNPPGGSTTS SPVTTSPTPP PTGPTVPQWG |
| | | | QCGGIGYSGS TTCASPYTCH VLNPYYSQCY |
| SEQ ID NO: 41 | 50402144 | Trichoderma | MYRKLAVISA FLATARAQSA CTLQSETHPP LTWQKCSSGG TCTQQTGSVV IDANWRWTHA TNSSTNCYDG NTWSSTLCPD |
| | | reesei | NETCAKNCCL DGAAYASTYG VTTSGNSLSI GFVTQSAQKN VGARLYLMAS DTTYQEFTLL GNEFSFDVDV SQLPCGLNGA |
| | | | LYFVSMDADG GVSKYPTNTA GAKYGTGYCD SQCPRDLKFI NGQANVEGWE PSSNNANTGI GGHGSCCSEM DIWEANSISE |
| | | | ALTPHPCTTV GQEICEGDGC GGTYSDNRYG GTCDPDGCDW NPYRLGNTSF YGPGSSFTLD TTKKLTVVTQ FETSGAINRY |
| | | | YVQNGVTFQQ PNAELGSYSG NELNDDYCTA EEAEFGGSSF SDKGGLTQFK KATSGGMVLV MSLWDDYYAN MLWLDSTYPT |
| | | | NETSSTPGAV RGSCSTSSGV PAQVESQSPN AKVTFSNIKF GPIGSTGNPS GGNPPGGNRG TTTTRRPATT TGSSPGPTQS |
| | | | HYGQCGGIGY SGPTVCASGT TCQVLNPYYS QCL |
| SEQ ID NO: 42 | 115397177 | Aspergillus terreus | MPSTYDIYKK LLLLASFLSA SQAQQVGTSK AEVHPSLTWQ TCTSGGSCTT VNGKVVVDAN WRWVHNVDGY NNCYTGNTWD |
| | | NIH2624 | TTLCPDDETC ASNCALEGAD YSGTYGVTTS GNSLRLNFVT QASQKNIGSR LYLMEDDSTY KMFKLLNQEF TFDVDVSNLP |
| | | | CGLNGAVYFV SMDADGGMAK YPANKAGAKY GTGYCDSQCP RDLKFINGMA NVEGWEPSAN DANAGTGNHG SCCAEMDIWE |
| | | | ANSISTAYTP HPCDTPGQVM CTGDSCGGTY SSDRYGGTCD PDGCDFNSYR QGNKTFYGPG MTVDTKSKIT VVTQFLTNDG |
| | | | TASGTLSEIK RFYVQNGKVI PNSESTWSGV SGNSITTAYC NAQKTLFGDT DVFTKHGGME GMGAALAEGM VLVLSLWDDH |
| | | | NSNMLWLDSN YPTDKPSTTP GVARGSCDIS SGDPKDVEAN DANAYVVYSN IKVGPIGSTF SGSTGGGSSS STTATSKTTT |
| | | | TSATKTTTTT TKTTTTTSAS STSTGGAQHW AQCGGIGWTG PTTCVAPYTC QKQNDYYSQC L |
| SEQ ID NO: 43 | 154312003 | Botryotinia | MISKVLAFTS LLAAARAQQA GTLTTETHPP LSVSQCTASG CTTSAQSIVV DANWRWLHST TGSTNCYTGN TWDKTLCPDG |
| | | fuckeliana B05-10 | ATCAANCALD GADYSGVYGI TTSGNSIKLN FVTKGANTNV GSRTYLMAAG STTQYQMLKL LNQEFTFDVD VSNLPCGLNG |
| | | | ALYFAAMDAD GGLSRFPTNK AGAKYGTGYC DAQCPQDIKF INGVANSVGW TPSSNDVNAG AGQYGSCCSE MDIWEANKIS |
| | | | AAYTPHPCSV DTQTRCTGTD CGIGARYSSL CDADGCDFNS YRQGNTSFYG AGLTVNTNKV FTVVTQFITN DGTASGTLKE |
| | | | IRRFYVQNGV VIPNSQSTIA GVPGNSITDS FCAAQKTAFG DTNEFATKGG LATMSKALAK GMVLVMSIWD DHTANMLWLD |
| | | | APYPATKSPS APGVTRGSCS ATSGNPVDVE ANSPGSSVTF SNIKWGPINS TYTGSGAAPS VPGTTTVSSA PASTATSGAG |
| | | | GVAKYAQCGG SGYSGATACV SGSTCVALNP YYSQCQ |
| SEQ ID NO: 44 | 49333365 | Volvariella | MFPAATLFAF SLFAAVYGQQ VGTQLAETHP RLTWQKCTRS GGCQTQSNGA IVLDANWRWV HNVGGYTNCY TGNTWNTSLC |
| | | volvacea | PDGATCAKNC ALDGANYQST YGITTSGNAL TLKFVTQSEQ KNIGSRVYLL ESDTKYQLFN PLNQEFTFDV DVSQLPCGLN |
| | | | GAVYFSAMDA DGGMSKFPNN AAGAKYGTGY CDSQCPRDIK FINGEANVQG WQPSPNDTNA GTGNYGACCN EMDVWEANSI |
| | | | STAYTPHPCT QQGLVRCSGT ACGGGSNRYG SICDPDGCDF NSFRMGDKSF YGPGLTVNTQ QKFTVVTQFL TNNNSSSGTL |
| | | | REIRRLYVQN GRVIQNSKVN IPGMPSTMDS VTTEFCNAQK TAFNDTFSFQ QKGGMANMSE ALRRGMVLVL SIWDDHAANM |
| | | | LWLDSNYPTD RPASQPGVAR GTCPTSSGKP SDVENSTANS QVIYSNIKFG DIGSTYSA |
| SEQ ID NO: 45 | 729650 | Penicillium | MKGSISYQIY KGALLLSALL NSVSAQQVGT LTAETHPALT WSKCTAGXCS QVSGSVVIDA NWPXVHSTSG STNCYTGNTW |
| | | janthinellum | DATLCPDDVT CAANCAVDGA RRQHLRVTTS GNSLRINFVT TASQKNIGSR LYLLENDTTY QKFNLLNQEF TFDVDVSNLP |
| | | | CGLNGALYFV DMDADGGMAK YPTNKAGAKY GTGYCDSQCP RDLKFINGQA NVDGWTPSKN DVNSGIGNHG SCCAEMDIWE |
| | | | ANSISNAVTP HPCDTPSQTM CTGQRCGGTY STDRYGGTCD PDGCDFNPYR MGVTNFYGPG ETIDTKSPFT VVTQFLTNDG |
| | | | TSTGTLSEIK RFYVQGGKVI GNPQSTIVGV SGNSITDSWC NAQKSAFGDT NEFSKHGGMA GMGAGLADGM VLVMSLWDDH |
| | | | ASDMLWLDST YPTNATSTTP GAKRGTCDIS RRPNTVESTY PNAYVIYSNI KTGPLNSTFT GGTTSSSSTT TTTSKSTSTS |
| | | | SSSKTTTTVT TTTTSSGSSG TGARDWAQCG GNGWTGPTTC VSPYTCTKQN DWYSQCL |
| SEQ ID NO: 46 | 146424871 | Pleurotus sp | MFRTAALTAF TLAAVVLGQQ VGTLTAENHP ALSIQQCTAS GCTTQQKSVV LDSNWRWTHS LPVHTNCYTG NAWDASLCPD |
| | | Florida | PTTCATNCAI DGADYSGTYG ITTSGNALTL RFVTNGPYSK NIGSRVYLLD DADHYKMFDL KNQEFTFDVD MSGLPCGLNG |
| | | | ALYFSEMPAD GGKAAHTSNK AGAKYGTGYC DAQCPHDIKW INGEANILDW SASATDANAG NGRYGACCAE MDIWEANSEA |
| | | | TAYTPHVCRD EGLYRCSGTE CGDGDNRYGG VCDKDGCDFN SYRMGDKNFL GRGKTIDTTK KITVVTQFIT DDNTSSGNLV |
| | | | EIRRVYVQDG VTYQNSFSTF PSLSQYNSIS DDFCVAQKTL FGDNQYYNTH GGTEKMGDAM ANGMVLIMSL WSDHAAHMLW |
| | | | LDSDYPLDKS PSEPGVSRGA CATTTGDPDD VVANHPNASV TFSNIKYGPI GSTYGGSTPP VSSGNTSAPP VTSTTSSGPT |
| | | | TPTGPTGTVP KWGQCGGNGY SGPTTCVAGS TCTYSNDWYS QCL |
| SEQ ID NO: 47 | 67538012 | Aspergillus | MYQRALLFSA LLSVSRAQQA GTAQEEVHPS LTWQRCEASG SCTEVAGSVV LDSNWRWTHS VDGYTNCYTG NEWDATLCPD |
| | | nidulans FGSC A4 | NESCAQNCAV DGADYEATYG ITSNGDSLTL KFVTGSNVGS RVYLMEDDET YQMFDLLNNE FTFDVDVSNL PCGLNGALYF |
| | | | TSMDADGGLS KYEGNTAGAK YGTGYCDSQC PRDIKFINGL GNVEGWEPSD SDANAGVGGM GTCCPEMDIW EANSISTAYT |
| | | | PHPCDSVEQT MCEGDSCGGT YSDDRYGGTC DPDGCDFNSY RMGNTSFYGP GAIIDTSSKF TVVTQFIADG GSLSEIKRFY |
| | | | VQNGEVIPNS ESNISGVEGN SITSEFCTAQ KTAFGDEDIF AQHGGLSAMG DAASAMVLIL SIWDDHHSSM MWLDSSYPTD |
| | | | ADPSQPGVAR GTCEQGAGDP DVVESEHADA SVTFSNIKFG PIGSTF |
| SEQ ID NO: 48 | 62006162 | Fusarium poae | MYRAIATASA LIAAVRAQQV CSLTTETKPA LTWSKCTSSG CSNVQGSVTI DANWRWTHQV SGSTNCHTGN KWDTSVCTSG |
| | | | KVCAEKCCVD GADYASTYGI TSSGNQLSLS FVTKGSYGTN IGSRTYLMED ENTYQMFQLL GNEFTFDVDV SNIGCGLNGA |
| | | | LYFVSMDADG GKAKYPGNKA GAKYGTGYCD AQCPRDVKFI NGQANSDGWE PSKSDVNGGI GNLGTCCPEM DIWEANSIST |
| | | | AYTPHPCTKL TQHACTGDSC GGTYSNDRYG GTCDADGCDF NAYRQGNKTF YGPGSGFNVD TTKKVTVVTQ FHKGSNGRLS |
| | | | EITRLYVQNG KVIANSESKI AGNPGSSLTS DFCTTQKKVF GDIDDFAKKG AWNGMSDALE APMVLVMSLW HDHHSNMLWL |
| | | | DSTYPTDSTA LGSQRGSCST SSGVPADLEK NVPNSKVAFS NIKFGPIGST YNKEGTQPQP TNPTNPNPTN PTNPGTVDQW |
| | | | GQCGGTNYSG PTACKSPFTC KKINDFYSQC Q |
| SEQ ID NO: 49 | 146424873 | Pleurotus sp | MFRTAALTAF TLAAVVLGQQ VGTLAAENHP ALSIQQCTAS GCTTQQKSVV LDSNWRWTHS TAGATNCYTG NAWDSSLCPN |
| | | Florida | PTTCATNCAI DGADYSGTYG ITTSGNSLTL RFVTNGQYSE NIGSRVYLLD DADHYKLFNL KNQEFTFDVD MSGLPCGLNG |
| | | | ALYFSEMAAD GGKAAHTGNN AGAKYGTGYC DAQCPHDIKW INGEANILDW SGSATDPNAG NGRYGACCAE MDIWEANSEA |
| | | | TAYTPHVCRD EGLYRCSGTE CGDGDNRYGG VCDKDGCDFN SYRMGDKNFL GRGKTIDTTK KITVVTQFIT DDNTPTGNLV |
| | | | EIRRVYVQDG VTYQNSFSTF PSLSQYNSIS DDFCVAQKTL FGDNQYYNTH GGTEKMGDSL ANGMVLIMSL WSDHAAHMLW |
| | | | LDSDYPLDKS PSEPGVSRGA CATTTGDPDD VVANHPNASV TFSNIKYGPI GSTYGGSTPP VSSGNTSVPP VTSTTSSGPT |
| | | | TPTGPTGTVP KWGQCGGIGY SGPTSCVAGS TCTYSNEWYS QCL |
| SEQ ID NO: 50 | 295937 | Trichoderma | MYQKLALISA FLATARAQSA CTLQAETHPP LTWQKCSSGG TCTQQTGSVV IDANWRWTHA TNSSTNCYDG NTWSSTLCPD |
| | | viride | NETCAKNCCL DGAAYASTYG VTTSADSLSI GFVTQSAQKN VGARLYLMAS DTTYQEFTLL GNEFSFDVDV SQLPCGLNGA |
| | | | LYFVSMDADG GVTKYPTNTA GAKYGTGYCD SQCPRDLKFI NGQANVEGWE PSSNNANTGI GGHGSCCSEM DIWEANSISE |
| | | | ALTPHPCTTV GQEICEGDSC GGTYSGDRYG GTCDPDGCDW NPYRLGNTSF YGPGSSFTLD TTKKLTVVTQ FETSGAINRY |
| | | | YVQNGVTFQQ PNAELGDYSG NSLDDDYCAA EEAEFGGSSF SDKGGLTQFK KATSGGMVLV MSLWDDYYAN MLWLDSTYPT |
| | | | DETSSTPGAV RGSSSTSSGV PAQLESNSPN AKVVYSNIKF GPIGSTGNPS GGNPPGGNPP GTTTPRPATS TGSSPGPTQT |
| | | | HYGQCGGIGY IGPTVCASGS TCQVLNPYYS QCL |
| SEQ ID NO: 51 | 6179889 # | Alternaria | MTWQSCTAKG SCTNKNGKIV IDANWRWLHK KEGYDNCYTG NEWDATACPD NKACAANCAV DGADYSGTYG ITAGSNSLKL |
| | | alternata | KFITKGSYST NIGSRTYLMK DDTTYEMFKF TGNQEFTFDV DVSNLPCGFN GALYFVSMDA DGGLKKYSTN KAGAKYGTGY |
| | | | CDAQCPRDLK FINGEGNVEG WKPSSNDANA GVGGHGSCCA EMDIWEANSV STAVTPHSCS TIEQSRCDGD GCGGTYSADR |
| | | | YAGVCDPDGC DFNSYRMGVK DFYGKGKTVD TSKKFTVVTQ FIGTGDAMEI KRFYVQNGKT IAQPASAVPG VEGNSITTKF |
| | | | CDQQKAVFGD TYTFKDKGGM ANMAKALANG MVLVMSLWDD HYSNMLWLDS TYPTDKNPDT DLGTGRGECE TSSGVPADVE |
| | | | SQHADATVVY SNIKFGPLNS TFG |
| SEQ ID NO: 52 | 119483864 | Neosartorya | MASAISFQVY RSALILSAFL PSITQAQQIG TYTTETHPSM TWETCTSGGS CATNQGSVVM DANWRWVHQV GSTTNCYTGN |
| | | fischeri NRRL 181 | TWDTSICDTD ETCATECAVD GADYESTYGV TTSGSQIRLN FVTQNSNGAN VGSRLYMMAD NTHYQMFKLL NQEFTFDVDV |
| | | | SNLPCGLNGA LYFVTMDEDG GVSKYPNNKA GAQYGVGYCD SQCPRDLKFI QGQANVEGWT PSSNNENTGL GNYGSCCAEL |
| | | | DIWESNSISQ ALTPHPCDTA TNTMCTGDAC GGTYSSDRYA GTCDPDGCDF NPYRMGNTTF YGPGKTIDTN SPFTVVTQFI |
| | | | TDDGTDTGTL SEIRRYYVQN GVTYAQPDSD ISGITGNAIN ADYCTAENTV FDGPGTFAKH GGFSAMSEAM STGMVLVMSL |
| | | | WDDYYADMLW LDSTYPTNAS SSTPGAVRGS CSTDSGVPAT IESESPDSYV TYSNIKVGPI GSTFSSGSGS GSSGSGSSGS |
| | | | ASTSTTSTKT TAATSTSTAV AQHYSQCGGQ DWTGPTTCVS PYTCQVQNAY YSQCL |
| SEQ ID NO: 53 | 85083281 | Neurospora crassa | MKAYFEYLVA ALPLLGLATA QQVGKQTTET HPKLSWKKCT GKANCNTVNA EVVIDSNWRW LHDSSGKNCY DGNKWTSACS |
| | | OR74A | SATDCASKCQ LDGANYGTTY GASTSGDALT LKFVTKHEYG TNIGSRFYLM NGASKYQMFT LMNNEFAFDV DLSTVECGLN |
| | | | AALYFVAMEE DGGMASYSSN KAGAKYGTGY CDAQCARDLK FVGGKANIEG WTPSTNDANA GVGPYGGCCA EIDVWESNAH |
| | | | SFAFTPHACK TNKYHVCERD NCGGTYSEDR FAGLCDANGC DYNPYRMGNT DFYGKGKTVD TSKKFTVVSR FEENKLTQFF |
| | | | VQNGQKIEIP GPKWDGIPSD NANITPEFCS AQFQAFGDRD RFAEVGGFAQ LNSALRMPMV LVMSIWDDHY ANMLWLDSVY |
| | | | PPEKEGQPGA ARGDCPQSSG VPAEVESQYA NSKVVYSNIR FGPVGSTVNV |
| SEQ ID NO: 54 | 3913803 | Cryphonectria | MFSKFALTGS LLAGAVNAQG VGTQQTETHP QMTWQSCTSP SSCTTNQGEV VIDSNWRWVH DKDGYVNCYT GNTWNTTLCP |
| | | parasitica | DDKTCAANCV LDGADYSSTY GITTSGNALS LQFVTQSSGK NIGSRTYLME SSTKYHLFDL IGNEFAFDVD LSKLPCGLNG |
| | | | ALYFVTMDAD GGMAKYSTNT AGAEYGTGYC DSQCPRDLKF INGQGNVEGW TPSTNDANAG VGGLGSCCSE MDVWEANSMD |
| | | | MAYTPHPCET AAQHSCNADE CGGTYSSSRY AGDCDPDGCD WNPFRMGNKD FYGSGDTVDT SQKFTVVTQF HGSGSSLTEI |
| | | | SQYYIQGGTK IQQPNSTWPT LTGYNSITDD FCKAQKVEFN DTDVFSEKGG LAQMGAGMAD GMVLVMSLWD DHYANMLWLD |
| | | | STYPVDADAS SPGKQRGTCA TTSGVPADVE SSDASATVIY SNIKFGPIGA TY |
| SEQ ID NO: 55 | 60729633 | Corticium rolfsii | MFPAAALLSF TLLAVASAQQ IGTNTAEVHP SLTVSQCTTS GGCTSSTQSI VLDANWRWLH STSGYTNCYT GNQWNSDLCP |
| | | | DPDTCATNCA LDGASYESTY GISTDGNAVT LNFVTQGSQT NVGSRVYLLS DDTHYQTFSL LNKEFSFDVD ASNIGCGING |
| | | | AVYFVQMDAD GGLSKYSSNK AGAQYGTGYC DSQCPQDIKF INGEANLLDW NATSANSGTG SYGSCCPEMD IWEANKYAAA |
| | | | YTPHPCSVSG QTRCTGTSCG AGSERYDGYC DKDGCDFNSW RMGNETFLGP GMTIDTNKKF TIVTQFITDD NTANGTLSEI |
| | | | RRLYVQGGTV IQNSVANQPN IPKVNSITDS FCTAQKTEFG DQDYFGTIGG LSQMGKAMSD MVLVMSIWDD YDAEMLWLDS |
| | | | NYPTSGSAST PGISRGPCSA TSGLPATVES QQASASVTYS NIKWGDIGST YSGSGSSGSS SSSSSSAASA STSTHTSAAA |
| | | | TATSSAAAAT GSPVPAYGQC GGQSYTGSTT CASPYVCKVS NAYYSQCLPA |
| SEQ ID NO: 56 | 39971383 | Magnaporthe | MKRALCASLS LLAAAVAQQV GTNEPEVHPK MTWKKCSSGG SCSTVNGEVV IDGNWRWIHN IGGYENCYSG NKWTSVCSTN |
| | | grisea 70-15 | ADCATKCAME GAKYQETYGV STSGDALTLK FVQQNSSGKN VGSRMYLMNG ANKYQMFTLK NNEFAFDVDL SSVECGMNSA |
| | | | LYFVPMKEDG GMSTEPNNKA GAKYGTGYCD AQCARDLKFI GGKGNIEGWQ PSSTDSSAGI GAQGACCAEI DIWESNKNAF |
| | | | AFTPHPCENN EYHVCTEPNC GGTYADDRYG GGCDANGCDY NPYRMGNPDF YGPGKTIDTN RKFTVISRFE NNRNYQILMQ |
| | | | DGVAHRIPGP KFDGLEGETG ELNEQFCTDQ FTVFDERNRF NEVGGWSKLN AAYEIPMVLV MSIWSDHFAN MLWLDSTYPP |
| | | | EKAGQPGSAR GPCPADGGDP NGVVNQYPNA KVIWSNVRFG PIGSTYQVD |
| SEQ ID NO: 57 | 39973029 | Magnaporthe | MQLTKAGVFL GALMGGAAAQ QVGTQTAENH PKMTWKKCTG KASCTTVNGE VVIDANWRWL HDASSKNCYD GNRWTDSCRT |
| | | grisea 70-15 | ASDCAAKCSL EGADYAKTYG ASTSGDALSL KFVTRHDYGT NIGSRFYLMN GASKYQMFSL LGNEFAFDVD LSTIECGLNS |
| | | | ALYFVAMEED GGMKSYSSNK AGAKYGTGYC DAQCARDLKF VGGKANIEGW KPSSNDANAG VGPYGACCAE IDVWESNAHA |
| | | | FAFTPHPCTD NKYHVCQDSN CGGTYSDDRF AGKCDANGCD INPYRLGNTD FYGKGKTVDT SKKFTVVTRF ERDALTQFFV |
| | | | QNNKRIDMPS PALEGLPATG AITAEYCTNV FNVFGDRNRF DEVGGWSQLQ QALSLPMVLV MSIWDDHYSN MLWLDSVYPP |
| | | | DKEGSPGAAR GDCPQDSGVP SEVESQIPGA TVVWSNIRFG PVGSTVNV |
| SEQ ID NO: 58 | 1170141 | Fusarium | MYRIVATASA LIAAARAQQV CSLNTETKPA LTWSKCTSSG CSDVKGSVVI DANWRWTHQT SGSTNCYTGN KWDTSICTDG |
| | | oxysporum | KTCAEKCCLD GADYSGTYGI TSSGNQLSLG FVTNGPYSKN IGSRTYLMEN ENTYQMFQLL GNEFTFDVDV SGIGCGLNGA |
| | | | PHFVSMDEDG GKAKYSGNKA GAKYGTGYCD AQCPRDVKFI NGVANSEGWK PSDSDVNAGV GNLGTCCPEM DIWEANSIST |
| | | | AFTPHPCTKL TQHSCTGDSC GGTYSSDRYG GTCDADGCDF NAYRQGNKTF YGPGSNFNID TTKKMTVVTQ FHKGSNGRLS |
| | | | EITRLYVQNG KVIANSESKI AGNPGSSLTS DFCSKQKSVF GDIDDFSKKG GWNGMSDALS APMVLVMSLW HDHHSNMLWL |
| | | | DSTYPTDSTK VGSQRGSCAT TSGKPSDLER DVPNSKVSFS NIKFGPIGST YKSDGTTPNP PASSSTTGSS TPTNPPAGSV |
| | | | DQWGQCGGQN YSGPTTCKSP FTCKKINDFY SQCQ |
| SEQ ID NO: 59 | 121710012 | Aspergillus | MYQRALLFSA LATAVSAQQV GTQKAEVHPA LTWQKCTAAG SCTDQKGSVV IDANWRWLHS TEDTTNCYTG NEWNAELCPD |
| | | clavatus NRRL 1 | NEACAKNCAL DGADYSGTYG VTADGSSLKL NFVTSANVGS RLYLMEDDET YQMFNLLNNE FTFDVDVSNL PCGLNGALYF |
| | | | VSMDADGGLS KYPGNKAGAK YGTGYCDSQC PRDLKFINGE ANVEGWKPSD NDKNAGVGGY GSCCPEMDIW EANSISTAYT |
| | | | PHPCDGMEQT RCDGNDCGGT YSSTRYAGTC DPDGCDFNSF RMGNESFYGP GGLVDTKSPI TVVTQFVTAG GTDSGALKEI |
| | | | RRVYVQGGKV IGNSASNVAG VEGDSITSDF CTAQKKAFGD EDIFSKHGGL EGMGKALNKM ALIVSIWDDH ASSMMWLDST |
| | | | YPVDADASTP GVARGTCEHG LGDPETVESQ HPDASVTFSN IKFGPIGSTY KSV |
| SEQ ID NO: 60 | 17902580 | Penicillium | MSALNSFNMY KSALILGSLL ATAGAQQIGT YTAETHPSLS WSTCKSGGSC TTNSGAITLD ANWRWVHGVN TSTNCYTGNT |
| | | funiculosum | WNTAICDTDA SCAQDCALDG ADYSGTYGIT TSGNSLRLNF VTGSNVGSRT YLMADNTHYQ IFDLLNQEFT FTVDVSNLPC |
| | | | GLNGALYFVT MDADGGVSKY PNNKAGAQYG VGYCDSQCPR DLKFIAGQAN VEGWTPSTNN SNTGIGNHGS CCAELDIWEA |
| | | | NSISEALTPH PCDTPGLTVC TADDCGGTYS SNRYAGTCDP DGCDFNPYRL GVTDFYGSGK TVDTTKPFTV VTQFVTDDGT |
| | | | SSGSLSEIRR YYVQNGVVIP QPSSKISGIS GNVINSDFCA AELSAFGETA SFTNHGGLKN MGSALEAGMV LVMSLWDDYS |
| | | | VNMLWLDSTY PANETGTPGA ARGSCPTTSG NPKTVESQSG SSYVVFSDIK VGPFNSTFSG GTSTGGSTTT TASGTTSTKA |
| | | | STTSTSSTST GTGVAAHWGQ CGGQGWTGPT TCASGTTCTV VNPYYSQCL |
| SEQ ID NO: 61 | 1346226 | Humicola grisea | MRTAKFATLA ALVASAAAQQ ACSLTTERHP SLSWNKCTAG GQCQTVQASI TLDSNWRWTH QVSGSTNCYT GNKWDTSICT |
| | | var thermoidea | DAKSCAQNCC VDGADYTSTY GITTNGDSLS LKFVTKGQHS TNVGSRTYLM DGEDKYQTFE LLGNEFTFDV DVSNIGCGLN |
| | | | GALYFVSMDA DGGLSRYPGN KAGAKYGTGY CDAQCPRDIK FINGEANIEG WTGSTNDPNA GAGRYGTCCS EMDIWEANNM |
| | | | ATAFTPHPCT IIGQSRCEGD SCGGTYSNER YAGVCDPDGC DFNSYRQGNK TFYGKGMTVD TTKKITVVTQ FLKDANGDLG |
| | | | EIKRFYVQDG KIIPNSESTI PGVEGNSITQ DWCDRQKVAF GDIDDFNRKG GMKQMGKALA GPMVLVMSIW DDHASNMLWL |
| | | | DSTFPVDAAG KPGAERGACP TTSGVPAEVE AEAPNSNVVF SNIRFGPIGS TVAGLPGAGN GGNNGGNPPP PTTTTSSAPA |
| | | | TTTTASAGPK AGRWQQCGGI GFTGPTQCEE PYICTKLNDW YSQCL |
| SEQ ID NO: 62 | 156712282 | Chaetomium | MMYKKFAALA ALVAGASAQQ ACSLTAENHP SLTWKRCTSG GSCSTVNGAV TIDANWRWTH TVSGSTNCYT GNQWDTSLCT |
| | | thermophilum | DGKSCAQTCC VDGADYSSTY GITTSGDSLN LKFVTKHQYG TNVGSRVYLM ENDTKYQMFE LLGNEFTFDV DVSNLGCGLN |
| | | | GALYFVSMDA DGGMSKYSGN KAGAKYGTGY CDAQCPRDLK FINGEANVGN WTPSTNDANA GFGRYGSCCS EMDVWEANNM |
| | | | ATAFTPHPCT TVGQSRCEAD TCGGTYSSDR YAGVCDPDGC DFNAYRQGDK TFYGKGMTVD TNKKMTVVTQ FHKNSAGVLS |
| | | | EIKRFYVQDG KIIANAESKI PGNPGNSITQ EYCDAQKVAF SNTDDFNRKG GMAQMSKALA GPMVLVMSVW DDHYANMLWL |
| | | | DSTYPIDQAG APGAERGACP TTSGVPAEIE AQVPNSNVIF SNIRFGPIGS TVPGLDGSNP GNPTTTVVPP ASTSTSRPTS |
| | | | STSSPVSTPT GQPGGCTTQK WGQCGGIGYT GCTNCVAGTT CTQLNPWYSQ CL |
| SEQ ID NO: 63 | 169768818 | Aspergillus oryzae | MASLSLSKIC RNALILSSVL STAQGQQVGT YQTETHPSMT WQTCGNGGSC STNQGSVVLD ANWRWVHQTG SSSNCYTGNK |
| | | RIB40 | WDTSYCSTND ACAQKCALDG ADYSNTYGIT TSGSEVRLNF VTSNSNGKNV GSRVYMMADD THYEVYKLLN QEFTFDVDVS |
| | | | KLPCGLNGAL YFVVMDADGG VSKYPNNKAG AKYGTGYCDS QCPRDLKFIQ GQANVEGWVS STNNANTGTG NHGSCCAELD |
| | | | IWESNSISQA LTPHPCDTPT NTLCTGDACG GTYSSDRYSG TCDPDGCDFN PYRVGNTTFY GPGKTIDTNK PITVVTQFIT |
| | | | DDGTSSGTLS EIKRFYVQDG VTYPQPSADV SGLSGNTINS EYCTAENTLF EGSGSFAKHG GLAGMGEAMS TGMVLVMSLW |
| | | | DDYYANMLWL DSNYPTNEST SKPGVARGTC STSSGVPSEV EASNPSAYVA YSNIKVGPIG STFKS |
| SEQ ID NO: 64 | 46241270 | Gibberella | MYRAIATASA LIAAVRAQQV CSLTPETKPA LSWSKCTSSG CSNVQGSVTI DANWRWTHQL SGSTNCYTGN KWDTSICTSG |
| | | pulicaris | KVCAEKCCID GAEYASTYGI TSSGNQLSLS FVTKGAYGTN IGSRTYLMED ENTYQMFQLL GNEFTFDVDV SNIGCGLNGA |
| | | | LYFVSMDADG GKAKYPGNKA GAKYGTGYCD AQCPRDVKFI NGQANSDGWQ PSKSDVNAGI GNMGTCCPEM DIWEANSIST |
| | | | AYTPHPCTKL TQHSCTGDSC GGTYSNDRYG GTCDADGCDF NAYRQGNKTF YGPGSGFNVD TTKKVTVVTQ FHKGSNGRLS |
| | | | EITRLYVQNG KVIANSESKI AGVPGSSLTP EFCTAQKKVF GDTDDFAKKG AWSGMSDALE APMVLVMSLW HDHHSNMLWL |
| | | | DSTYPTDSTK LGAQRGSCST SSGVPADLEK NVPNSKVAFS NIKFGPIGST YKEGVPEPTN PTNPTNPTNP TNPGTVDQWA |
| | | | QCGGTNYSGP TACKSPFTCK KINDFYSQCQ |
| SEQ ID NO: 65 | 49333363 | Volvariella | MFPKSSLLVL SFLATAYAQQ VGTQTAEVHP SLNWARCTSS GCTNVAGSVT LDANWRWLHT TSGYTNCYTG NSWNTTLCPD |
| | | volvacea | GATCAQNCAL DGANYQSTCG ITTSGNALTL KFVTQGEQKN IGSRVYLMAS ESRYEMFGLL NKEFTFDVDV SNLPCGLNGA |
| | | | LYFSSMDADG GMAKNPGNKA GAKYGTGYCD SQCPRDIKFI NGEANVAGWN GSPNDTNAGT GNWGACCNEM DIWEANSISA |
| | | | AYTPHPCTVQ GLSRCSGTAC GTNDRYGTVC DPDGCDFNSY RMGDKTYYGP GGTGVDTRSK FTVVTQFLTN NNSSSGTLSE |
| | | | IRRLYVQNGR VVQNSKVNIP GMSNTLDSIT TGFCDSQKTA FGDTRSFQNK GGMSAMGQAL GAGMVLVLSV WDDHAANMLW |
| | | | LDSNYPVDAD PSKPGIARGT CSTTSGKPTD VEQSAANSSV TFSNIKFGDI GTTYTGGSVT TTPGNPGTTT STAPGAVQTK |
| | | | WGQCGGQGWT GPTRCESGST CTVVNQWYSQ CI |
| SEQ ID NO: 66 | 46395332 | Irpex lacteus | MFRKAALLAF SFLAIAHGQQ VGTNQAENHP SLPSQHCTAS GCTTSSTSVV LDANWRWVHT TTGYTNCYTG QTWDASICPD |
| | | | GVTCAKACAL DGADYSGTYG ITTSGNALTL QFVKGTNVGS RVYLLQDASN YQLFKLINQE FTFDVDMSNL PCGLNGAVYL |
| | | | SQMDQDGGVS RFPTNTAGAK YGTGYCDSQC PRDIKFINGE ANVAGWTGSS SDPNSGTGNY GTCCSEMDIW EANSVAAAYT |
| | | | PHPCSVNQQT RCTGADCGQD ANRYKGVCDP DGCDFNSFRM GDQTFLGKGL TVDTSRKFTI VTQFISDDGT SSGNLAEIRR |
| | | | FYVQDGKVIP NSKVNIAGCD AVNSITDKFC TQQKTAFGDT NRFADQGGLK QMGAALKSGM VLALSLWDDH AANMLWLDSD |
| | | | YPTTADASKP GVARGTCPNT SGVPKDVESQ SGSATVTYSN IKWGDLNSTF SGTASNPTGP SSSPSGPSSS SSSTAGSQPT |
| | | | QPSSGSVAQW GQCGGIGYSG ATGCVSPYTC HVVNPYYSQC Y |
| SEQ ID NO: 67 | 50844407 # | Chaetomium | TETHPRLTWK RCTSGGNCST VNGAVTIDAN WRWTHTVSGS TNCYTGNEWD TSICSDGKSC AQTCCVDGAD YSSTYGITTS |
| | | thermophilum var | GDSLNLKFVT KHQHGTNVGS RVYLMENDTK YQMFELLGNE FTFDVDVSNL GCGLNGALYF VSMDADGGMS KYSGNKAGAK |
| | | thermophilum | YGTGYCDAQC PRDLKFINGE ANIENWTPST NDANAGFGRY GSCCSEMDIW EANNMATAFT PHPCTIIGQS RCEGNSCGGT |
| | | | YSSERYAGVC DPDGCDFNAY RQGDKTFYGK GMTVDTTKKM TVVTQFHKNS AGVLSEIKRF YVQDGKIIAN AESKIPGNPG |
| | | | NSITQEWCDA QKVAFGDIDD FNRKGGMAQM SKALEGPMVL VMSVWDDHYA NMLWLDSTYP IDKAGTPGAE RGACPTTSGV |
| | | | PAEIEAQVPN SNVIFSNIRF GPIGSTVPGL DGSTPSNPTA TVAPPTSTTT SVRSSTTQIS TPTSQPGGCT TQKWGQCGGI |
| | | | GYTGCTNCVA GTTCTELNPW YSQCL |
| SEQ ID NO: 68 | 4586347 | Irpex lacteus | MFHKAVLVAF SLVTIVHGQQ AGTQTAENHP QLSSQKCTAG GSCTSASTSV VLDSNWRWVH TTSGYTNCYT GNTWDASICS |
| | | | DPVSCAQNCA LDGADYAGTY GITTSGDALT LKFVTGSNVG SRVYLMEDET NYQMFKLMNQ EFTFDVDVSN LPCGLNGAVY |
| | | | FVQMDQDGGT SKFPNNKAGA KFGTGYCDSQ CPQDIKFING EANIVDWTAS AGDANSGTGS FGTCCQEMDI WEANSISAAY |
| | | | TPHPCTVTEQ TRCSGSDCGQ GSDRFNGICD PDGCDFNSFR MGNTEFYGKG LTVDTSQKFT IVTQFISDDG TADGNLAEIR |
| | | | RFYVQNGKVI PNSVVQITGI DPVNSITEDF CTQQKTVFGD TNNFAAKGGL KQMGEAVKNG MVLALSLWDD YAAQMLWLDS |
| | | | DYPTTADPSQ PGVARGTCPT TSGVPSQVEG QEGSSSVIYS NIKFGDLNST FTGTLTNPSS PAGPPVTSSP SEPSQSTQPS |
| | | | QPAQPTQPAG TAAQWAQCGG MGFTGPTVCA SPFTCHVLNP YYSQCY |
| SEQ ID NO: 69 | 3980202 | Phanerochaete | MFRAAALLAF TCLAMVSGQQ AGTNTAENHP QLQSQQCTTS GGCKPLSTKV VLDSNWRWVH STSGYTNCYT GNEWNTSLCP |
| | | chrysosporium | DGKTCAANCA LDGADYSGTY GITSTGTALT LKFVTGSNVG SRVYLMADDT HYQLLKLLNQ EFTFDVDMSN LPCGLNGALY |
| | | | LSAMDADGGM SKYPGNKAGA KYGTGYCDSQ CPKDIKFING EANVGNWTET GSNTGTGSYG TCCSEMDIWE ANNDAAAFTP |
| | | | HPCTTTGQTR CSGDDCARNT GLCDHGDGCD FNSFRMGDKT FLGKGMTVDT SKPFTDVTQF LTNDNTSTGT LSEIRRIYIQ |
| | | | NGKVIQNSVA NIPGVDPVNS ITDNFCAQQK TAFGDTNWFA QKGGLKQMGE ALGNGMVLAL SIWDDHAANM LWLDSDYPTD |
| | | | KDPSAPGVAR GTCATTSGVP SDVESQVPNS QVVFSNIKFG DIGSTFSGTS SPNPPGGSTT SSPVTTSPTP PPTGPTVPQW |
| | | | GQCGGIGYSG STTCASPYTC HVLNPYYSQC Y |
| SEQ ID NO: 70 | 27125837 | Melanocarpus | MMMKQYLQYL AAALPLVGLA AGQRAGNETP ENHPPLTWQR CTAPGNCQTV NAEVVIDANW RWLHDDNMQN CYDGNQWTNA |
| | | albomyces | CSTATDCAEK CMIEGAGDYL GTYGASTSGD ALTLKFVTKH EYGTNVGSRF YLMNGPDKYQ MFNLMGNELA FDVDLSTVEC |
| | | | GINSALYFVA MEEDGGMASY PSNQAGARYG TGYCDAQCAR DLKFVGGKAN IEGWKSSTSD PNAGVGPYGS CCAEIDVWES |
| | | | NAYAFAFTPH ACTTNEYHVC ETTNCGGTYS EDRFAGKCDA NGCDYNPYRM GNPDFYGKGK TLDTSRKFTV VSRFEENKLS |
| | | | QYFIQDGRKI EIPPPTWEGM PNSSEITPEL CSTMFDVFND RNRFEEVGGF EQLNNALRVP MVLVMSIWDD HYANMLWLDS |
| | | | IYPPEKEGQP GAARGDCPTD SGVPAEVEAQ FPDAQVVWSN IRFGPIGSTY DF |
| SEQ ID NO: 71 | 171696102 | Podospora | MYRSATFLTF ASLVLGQQVG TYTAERHPSM PIQVCTAPGQ CTRESTEVVL DANWRWTHIT NGYTNCYTGN EWNATACPDG |
| | | anserina | ATCAKNCAVD GADYSGTYGI TTPSSGALRL QFVKKNDNGQ NVGSRVYLMA SSDKYKLFNL LNKEFTFDVD VSKLPCGLNG |
| | | | AVYFSEMLED GGLKSFSGNK AGAKYGTGYC DSQCPQDIKF INGEANVEGW GGADGNSGTG KYGICCAEMD IWEANSDATA |
| | | | YTPHVCSVNE QTRCEGVDCG AGSDRYNSIC DKDGCDFNSY RLGNREFYGP GKTVDTTRPF TIVTQFVTDD GTDSGNLKSI |
| | | | HRYYVQDGNV IPNSVTEVAG VDQTNFISEG FCEQQKSAFG DNNYFGQLGG MRAMGESLKK MVLVLSIWDD HAVNMNWLDS |
| | | | IFPNDADPEQ PGVARGRCDP ADGVPATIEA AHPDAYVIYS NIKFGAINST FTAN |
| SEQ ID NO: 72 | 3913802 | Cochliobolus | MYRTLAFASL SLYGAARAQQ VGTSTAENHP KLTWQTCTGT GGTNCSNKSG SVVLDSNWRW AHNVGGYTNC YTGNSWSTQY |
| | | carbonum | CPDGDSCTKN CAIDGADYSG TYGITTSNNA LSLKFVTKGS FSSNIGSRTY LMETDTKYQM FNLINKEFTF DVDVSKLPCG |
| | | | LNGALYFVEM AADGGIGKGN NKAGAKYGTG YCDSQCPHDI KFINGKANVE GWNPSDADPN GGAGKIGACC PEMDIWEANS |
| | | | ISTAYTPHPC RGVGLQECSD AASCGDGSNR YDGQCDKDGC DFNSYRMGVK DFYGPGATLD TTKKMTVITQ FLGSGSSLSE |
| | | | IKRFYVQNGK VYKNSQSAVA GVTGNSITES FCTAQKKAFG DTSSFAALGG LNEMGASLAR GHVLIMSLWG DHAVNMLWLD |
| | | | STYPTDADPS KPGAARGTCP TTSGKPEDVE KNSPDATVVF SNIKFGPIGS TFAQPA |
| SEQ ID NO: 73 | 50403723 | Trichoderma | MYQKLALISA FLATARAQSA CTLQAETHPP LTWQKCSSGG TCTQQTGSVV IDANWRWTHA TNSSTNCYDG NTWSSTLCPD |
| | | viride | NETCAKNCCL DGAAYASTYG VTTSADSLSI GFVTQSAQKN VGARLYLMAS DTTYQEFTLL GNEFSFDVDV SQLPCGLNGA |
| | | | LYFVSMDADG GVSKYPTNTA GAKYGTGYCD SQCPRDLKFI NGQANVEGWE PSSNNANTGI GGHGSCCSEM DIWEANSISE |
| | | | ALTPHPCTTV GQEICDGDSC GGTYSGDRYG GTCDPDGCDW NPYRLGNTSF YGPGSSFTLD TTKKLTVVTQ FETSGAINRY |
| | | | YVQNGVTFQQ PNAELGDYSG NSLDDDYCAA EEAEFGGSSF SDKGGLTQFK KATSGGMVLV MSLWDDYYAN MLWLDSTYPT |
| | | | NETSSTPGAV RGSCSTSSGV PAQLESNSPN AKVVYSNIKF GPIGSTGNSS GGNPPGGNPP GTTTTRRPAT STGSSPGPTQ |
| | | | THYGQCGGIG YSGPTVCASG STCQVLNPYY SQCL |
| SEQ ID NO: 74 | 3913798 | Aspergillus | MVDSFSIYKT ALLLSMLATS NAQQVGTYTA ETHPSLTWQT CSGSGSCTTT SGSVVIDANW RWVHEVGGYT NCYSGNTWDS |
| | | aculeatus | SICSTDTTCA SECALEGATY ESTYGVTTSG SSLRLNFVTT ASQKNIGSRL YLLADDSTYE TFKLFNREFT FDVDVSNLPC |
| | | | GLNGALYFVS MDADGGVSRF PTNKAGAKYG TGYCDSQCPR DLKFIDGQAN IEGWEPSSTD VNAGTGNHGS CCPEMDIWEA |
| | | | NSISSAFTAH PCDSVQQTMC TGDTCGGTYS DTTDRYSGTC DPDGCDFNPY RFGNTNFYGP GKTVDNSKPF TVVTQFITHD |
| | | | GTDTGTLTEI RRLYVQNGVV IGNGPSTYTA ASGNSITESF CKAEKTLFGD TNVFETHGGL SAMGDALGDG MVLVLSLWDD |
| | | | HAADMLWLDS DYPTTSCASS PGVARGTCPT TTGNATYVEA NYPNSYVTYS NIKFGTLNST YSGTSSGGSS SSSTTLTTKA |
| | | | STSTTSSKTT TTTSKTSTTS SSSTNVAQLY GQCGGQGWTG PTTCASGTCTKQNDYYSQCL |
| SEQ ID NO: 75 | 66828465 | Dictyostelium | MYRILKSFIL LSLVNMSLSQ KIGKLTPEVH PPMTFQKCSE GGSCETIQGE VVVDANWRWV HSAQGQNCYT GNTWNPTICP |
| | | discoideum | DDETCAENCY LDGANYESVY GVTTSEDSVR LNFVTQSQGK NIGSRLFLMS NESNYQLFHV LGQEFTFDVD VSNLDCGLNG |
| | | | ALYLVSMDSD GGSARFPTNE AGAKYGTGYC DAQCPRDLKF ISGSANVDGW IPSTNNPNTG YGNLGSCCAE MDLWEANNMA |
| | | | TAVTPHPCDT SSQSVCKSDS CGGAASSNRY GGICDPDGCD YNPYRMGNTS FFGPNKMIDT NSVITVVTQF ITDDGSSDGK |
| | | | LTSIKRLYVQ DGNVISQSVS TIDGVEGNEV NEEFCTNQKK VFGDEDSFTK HGGLAKMGEA LKDGMVLVLS LWDDYQANML |
| | | | WLDSSYPTTS SPTDPGVARG SCPTTSGVPS KVEQNYPNAY VVYSNIKVGP IDSTYKK |
| SEQ ID NO: 76 | 156060391 | Sclerotinia | MISRVLAISS LLAAARAQQI GTNTAEVHPA LTSIVIDANW RWLHTTSGYT NCYTGNSWDA TLCPDAVTCA ANCALDGADY |
| | | sclerotiorum 1980 | SGTYGITTSG NSLKLNFVTK GANTNVGSRT YLMAAGSKTQ YQLLKLLGQE FTFDVDVSNL PCGLNGALYF AEMDADGGVS |
| | | | RFPTNKAGAQ YGTGYCDAQC PQDIKFINGQ ANSVGWTPSS NDVNTGTGQY GSCCSEMDIW EANKISAAYT PHPCSVDGQT |
| | | | RCTGTDCGIG ARYSSLCDAD GCDFNSYRMG DTGFYGAGLT VDTSKVFTVV TQFITNDGTT SGTLSEIRRF YVQNGKVIPN |
| | | | SQSKVTGVSG NSITDSFCAA QKTAFGDTNE FATKGGLATM SKALAKGMVL VMSIWDDHSA NMLWLDAPYP ASKSPSAAGV |
| | | | SRGSCSASSG VPADVEANSP GASVTYSNIK WGPINSTYSA GTGSNTGSGS GSTTTLVSSV PSSTPTSTTG VPKYGQCGGS |
| | | | GYTGPTNCIG STCVSMGQYY SQCQ |
| SEQ ID NO: 77 | 116181754 | Chaetomium | MYRQVATALS FASLVLGQQV GTLTAETHPS LPIEVCTAPG SCTKEDTTVV LDANWRWTHV TDGYTNCYTG NAWNETACPD |
| | | globosum CBS | GKTCAANCAI DGAEYEKTYG ITTPEEGALR LNFVTESNVG SRVYLMAGED KYRLFNLLNK EFTMDVDVSN LPCGLNGAVY |
| | | 148-51 | FSEMDEDGGM SRFEGNKAGA KYGTGYCDSQ CPRDIKFING EANSEGWGGE DGNSGTGKYG TCCAEMDIWE ANLDATAYTP |
| | | | HPCKVTEQTR CEDDTECGAG DARYEGLCDR DGCDFNSFRL GNKEFYGPEK TVDTSKPFTL VTQFVTADGT DTGALQSIRR |
| | | | FYVQDGTVIP NSETVVEGVD PTNEITDDFC AQQKTAFGDN NHFKTIGGLP AMGKSLEKMV LVLSIWDDHA VYMNWLDSNY |
| | | | PTDADPTKPG VARGRCDPEA GVPETVEAAH PDAYVIYSNI KIGALNSTFA AA |
| SEQ ID NO: 78 | 145230535 | Aspergillus niger | MSSFQVYRAA LLLSILATAN AQQVGTYTTE THPSLTWQTC TSDGSCTTND GEVVIDANWR WVHSTSSATN CYTGNEWDTS |
| | | | ICTDDVTCAA NCALDGATYE ATYGVTTSGS ELRLNFVTQG SSKNIGSRLY LMSDDSNYEL FKLLGQEFTF DVDVSNLPCG |
| | | | LNGALYFVAM DADGGTSEYS GNKAGAKYGT GYCDSQCPRD LKFINGEANC DGWEPSSNNV NTGVGDHGSC CAEMDVWEAN |
| | | | SISNAFTAHP CDSVSQTMCD GDSCGGTYSA SGDRYSGTCD PDGCDYNPYR LGNTDFYGPG LTVDTNSPFT VVTQFITDDG |
| | | | TSSGTLTEIK RLYVQNGEVI ANGASTYSSV NGSSITSAFC ESEKTLFGDE NVFDKHGGLE GMGEAMAKGM VLVLSLWDDY |
| | | | AADMLWLDSD YPVNSSASTP GVARGTCSTD SGVPATVEAE SPNAYVTYSN IKFGPIGSTY SSGSSSGSGS SSSSSSTTTK |
| | | | ATSTTLKTTS TTSSGSSSTS AAQAYGQCGG QGWTGPTTCV SGYTCTYENA YYSQCL |
| SEQ ID NO: 79 | 46241266 | Nectria | MYRAIATASA LLATARAQQV CTLNTENKPA LTWAKCTSSG CSNVRGSVVV DANWRWAHST SSSTNCYTGN TWDKTLCPDG |
| | | haematococca | KTCADKCCLD GADYSGTYGV TSSGNQLNLK FVTVGPYSTN VGSRLYLMED ENNYQMFDLL GNEFTFDVDV NNIGCGLNGA |
| | | mpVI | LYFVSMDKDG GKSRFSTNKA GAKYGTGYCD AQCPRDVKFI NGVANSDEWK PSDSDKNAGV GKYGTCCPEM DIWEANKIST |
| | | | AYTPHPCKSL TQQSCEGDAC GGTYSATRYA GTCDPDGCDF NPYRQGNKTF YGPGSGFNVD TTKKVTVVTQ FIKGSDGKLS |
| | | | EIKRLYVQNG KVIGNPQSEI ANNPGSSVTD SFCKAQKVAF NDPDDFNKKG GWSGMSDALA KPMVLVMSLW HDHYANMLWL |
| | | | DSTYPKGSKT PGSARGSCPE DSGDPDTLEK EVPNSGVSFS NIKFGPIGST YTGTGGSNPD PEEPEEPEEP VGTVPQYGQC |
| | | | GGINYSGPTA CVSPYKCNKI NDFYSQCQ |
| SEQ ID NO: 80 | 1q9h (PDB) # | Talaromyces | EQAGTATAEN HPPLTWQECT APGSCTTQNG AVVLDANWRW VHDVNGYTNC YTGNTWDPTY CPDDETCAQN CALDGADYEG |
| | | emersonii | TYGVTSSGSS LKLNFVTGSN VGSRLYLLQD DSTYQIFKLL NREFSFDVDV SNLPCGLNGA LYFVAMDADG GVSKYPNNKA |
| | | | GAKYGTGYCD SQCPRDLKFI DGEANVEGWQ PSSNNANTGI GDHGSCCAEM DVWEANSISN AVTPHPCDTP GQTMCSGDDC |
| | | | GGTYSNDRYA GTCDPDGCDF NPYRMGNTSF YGPGKIIDTT KPFTVVTQFL TDDGTDTGTL SEIKRFYIQN SNVIPQPNSD |
| | | | ISGVTGNSIT TEFCTAQKQA FGDTDDFSQH GGLAKMGAAM QQGMVLVMSL WDDYAAQMLW LDSDYPTDAD PTTPGIARGT |
| | | | CPTDSGVPSD VESQSPNSYV TYSNIKFGPI NSTFTAS |
| SEQ ID NO: 81 | 157362170 | Polyporus | MFPTLALVSL SFLAIAYGQQ VGTLTAETHP KLSVSQCTAG GSCTTVQRSV VLDSNWRWLH DVGGSTNCYT GNTWDDSLCP |
| | | arcularius | DPTTCAANCA LDGADYSGTY GITTSGNALS LKFVTQGPYS TNIGSRVYLL SEDDSTYEMF NLKNQEFTFD VDMSALPCGL |
| | | | NGALYFVEMD KDGGSGRFPT NKAGSKYGTG YCDTQCPHDI KFINGEANVL DWAGSSNDPN AGTGHYGTCC NEMDIWEANS |
| | | | MGAAVTPHVC TVQGQTRCEG TDCGDGDERY DGICDKDGCD FNSWRMGDQT FLGPGKTVDT SSKFTVVTQF ITADNTTSGD |
| | | | LSEIRRLYVQ NGKVIANSKT QIAGMDAYDS ITDDFCNAQK TTFGDTNTFE QMGGLATMGD AFETGMVLVM SIWDDHEAKM |
| | | | LWLDSDYPTD ADASAPGVSR GPCPTTSGDP TDVESQSPGA TVIFSNIKTG PIGSTFTS |
| SEQ ID NO: 82 | 7804885 | Leptosphaeria | MLSASKAAAI LAFCAHTASA WVVGDQQTET HPKLNWQRCT GKGRSSCTNV NGEVVIDANW RWLAHRSGYT NCYTGSEWNQ |
| | | maculans | SACPNNEACT KNCAIEGSDY AGTYGITTSG NQMNIKFITK RPYSTNIGAR TYLMKDEQNY EMFQLIGNEF TFDVDLSQRC |
| | | | GMNGALYFVS MPQKGQGAPG AKYGTGYCDA QCARDLKFVR GSANAEGWTK SASDPNSGVG KKGACCAQMD VWEANSAATA |
| | | | LTPHSCQPAG YSVCEDTNCG GTYSEDRYAG TCDANGCDFN PFRVGVKDFY GKGKTVDTTK KMTVVTQFVG SGNQLSEIKR |
| | | | FYVQDGKVIA NPEPTIPGME WCNTQKKVFQ EEAYPFNEFG GMASMSEGMS QGMVLVMSLW DDHYANMLWL DSNWPREADP |
| | | | AKPGVARRDC PTSGGKPSEV EAANPNAQVM FSNIKFGPIG STFAHAA |
| SEQ ID NO: 83 | 121852 | Phanerochaete | MFRTATLLAF TMAAMVFGQQ VGTNTARSHP ALTSQKCTKS GGCSNLNTKI VLDANWRWLH STSGYTNCYT GNQWDATLCP |
| | | chrysosporium | DGKTCAANCA LDGADYTGTY GITASGSSLK LQFVTGSNVG SRVYLMADDT HYQMFQLLNQ EFTFDVDMSN LPCGLNGALY |
| | | | LSAMDADGGM AKYPTNKAGA KYGTGYCDSQ CPRDIKFING EANVEGWNAT SANAGTGNYG TCCTEMDIWE ANNDAAAYTP |
| | | | HPCTTNAQTR CSGSDCTRDT GLCDADGCDF NSFRMGDQTF LGKGLTVDTS KPFTVVTQFI TNDGTSAGTL TEIRRLYVQN |
| | | | GKVIQNSSVK IPGIDPVNSI TDNFCSQQKT AFGDTNYFAQ HGGLKQVGEA LRTGMVLALS IWDDYAANML WLDSNYPTNK |
| | | | DPSTPGVARG TCATTSGVPA QIEAQSPNAY VVFSNIKFGD LNTTYTGTVS SSSVSSSHSS TSTSSSHSSS STPPTQPTGV |
| | | | TVPQWGQCGG IGYTGSTTCA SPYTCHVLNP YYSQCY |
| SEQ ID NO: 84 | 126013214 | Penicillium | MYQRALLFSA LMAGVSAQQV GTQKPETHPP LAWKECTSSG CTSKDGSVVI DANWRWVHSV DGYKNCYTGN EWDSTLCPDD |
| | | decumbens | ATCATNCAVD GADYAGTYGA TTEGDSLSIN FVTGSNIGSR FYLMEDENKY QMFKLLNKEF TFDVDVSTLP CGLNGALYFV |
| | | | SMDADGGMSK YETNKAGAKY GTGYCDSQCP RDLKFINGKG NVEGWKPSAN DKNAGVGPHG SCCAEMDIWE ANSISTALTP |
| | | | HPCDTNGQTI CEGDSCGGTY STTRYAGTCD PDGCDFNPFR MGNESFYGPG KMVDTKSKMT VVTQFITSDG TDTGSLKEIK |
| | | | RVYVQNGKVI ANSASDVSGI TGNSITSDFC TAQKKTFGDE DVFNKHGGLS GMGDALGEGM VLVMSLWDDH NSNMLWLDGE |
| | | | KYPTDAAASK AGVSRGTCST DSGKPSTVES ESGSAKVVFS NIKVGSIGST FSA |
| SEQ ID NO: 85 | 156048578 | Sclerotinia | MTSKIALASL FAAAYGQQIG TYTTETHPSL TWQSCTAKGS CTTQSGSIVL DGNWRWTHST TSSTNCYTGN TWDATLCPDD |
| | | sclerotiorum 1980 | ATCAQNCALD GADYSGTYGI TTSGDSLRLN FVTQTANKNV GSRVYLLADN THYKTFNLLN QEFTFDVDVS NLPCGLNGAV |
| | | | YFANLPADGG ISSTNKAGAQ YGTGYCDSQC PRDGKFINGK ANVDGWVPSS NNPNTGVGNY GSCCAEMDIW EANSISTAVT |
| | | | PHSCDTVTQT VCTGDNCGGT YSTTRYAGTC DPDGCDFNPY RQGNESFYGP GKTVDTNSVF TIVTQFLTTD GTSSGTLNEI |
| | | | KRFYVQNGKV IPNSESTISG VTGNSITTPF CTAQKTAFGD PTSFSDHGGL ASMSAAFEAG MVLVLSLWDD YYANMLWLDS |
| | | | TYPTTKTGAG GPRGTCSTSS GVPASVEASS PNAYVVYSNI KVGAINSTFG |
| SEQ ID NO: 86 | 156712278 | Acremonium | MYTKFAALAA LVATVRGQAA CSLTAETHPS LQWQKCTAPG SCTTVSGQVT IDANWRWLHQ TNSSTNCYTG NEWDTSICSS |
| | | thermophilum | DTDCATKCCL DGADYTGTYG VTASGNSLNL KFVTQGPYSK NIGSRMYLME SESKYQGFTL LGQEFTFDVD VSNLGCGLNG |
| | | | ALYFVSMDLD GGVSKYTTNK AGAKYGTGYC DSQCPRDLKF INGQANIDGW QPSSNDANAG LGNHGSCCSE MDIWEANKVS |
| | | | AAYTPHPCTT IGQTMCTGDD CGGTYSSDRY AGICDPDGCD FNSYRMGDTS FYGPGKTVDT GSKFTVVTQF LTGSDGNLSE |
| | | | IKRFYVQNGK VIPNSESKIA GVSGNSITTD FCTAQKTAFG DTNVFEERGG LAQMGKALAE PMVLVLSVWD DHAVNMLWLD |
| | | | STYPTDSTKP GAARGDCPIT SGVPADVESQ APNSNVIYSN IRFGPINSTY TGTPSGGNPP GGGTTTTTTT TTSKPSGPTT |
| | | | TTNPSGPQQT HWGQCGGQGW TGPTVCQSPY TCKYSNDWYS QCL |
| SEQ ID NO: 87 | 21449327 | Aspergillus | MYQRALLFSA LLSVSRAQQA GTAQEEVHPS LTWQRCEASG SCTEVAGSVV LDSNWRWTHS VDGYTNCYTG NEWDATLCPD |
| | | nidulans (also | NESCAQNCAV DGADYEATYG ITSNGDSLTL KFVTGSNVGS RVYLMEDDET YQMFDLLNNE FTFDVDVSNF PCGLNGALYF |
| | | known as | TSMDADGGLS KYEGNTAGAK YGTGYCDSQC PRDIKFINGL GNVEGWEPSD SDANAGVGGM GTCCPEMDIW EANSISTAYT |
| | | Emericella | PHPCDSVEQT MCEGDSCGGT YSDDRYGGTC DPDGCDFNSY RMGNTRFYGP GAIIDTSSKF TVVTQFIADG GSLSEIKRFY |
| | | nidulans) | VQNGEVIPNS ESNISGVEGN SITSEFCTAQ KTAFGDEDIF AQHGGLSAMG DAASAMVLIL SIWDDHHSSM MWLDSSYPTD |
| | | | ADPSQPGVAR GTCEQGAGDP DVVESEHADA SVTFSNIKFG PIGSTF |
| SEQ ID NO: 88 | 171683762 | Podospora | MMMKQYLQYL AAGSLMTGLV AGQGVGTQQT ETHPRITWKR CTGKANCTTV QAEVVIDSNW RWIHTSGGTN CYDGNAWNTA |
| | | anserine (S mat+) | ACSTATDCAS KCLMEGAGNY QQTYGASTSG DSLTLKFVTK HEYGTNVGSR FYLMNGASKY QMFTLMNNEF TFDVDLSTVE |
| | | | CGLNSALYFV AMEEDGGMRS YPTNKAGAKY GTGYCDAQCA RDLKFVGGKA NIEGWRESSN DENAGVGPYG GCCAEIDVWE |
| | | | SNAHAYAFTP HACENNNYHV CERDTCGGTY SEDRFAGGCD ANGCDYNPYR MGNPDFYGKG KTVDTTKKFT VVTRFQDDNL |
| | | | EQFFVQNGQK ILAPAPTFDG IPASPNLTPE FCSTQFDVFT DRNRFREVGD FPQLNAALRI PMVLVMSIWA DHYANMLWLD |
| | | | SVYPPEKEGE PGAARGPCAQ DSGVPSEVKA NYPNAKVVWS NIRFGPIGST VNV |
| SEQ ID NO: 89 | 56718412 | Thermoascus | MYQRALLFSF FLAAARAQQA GTVTAENHPS LTWQQCSSGG SCTTQNGKVV IDANWRWVHT TSGYTNCYTG NTWDTSICPD |
| | | aurantiacus var | DVTCAQNCAL DGADYSGTYG VTTSGNALRL NFVTQSSGKN IGSRLYLLQD DTTYQIFKLL GQEFTFDVDV SNLPCGLNGA |
| | | levisporus | LYFVAMDADG GLSKYPGNKA GAKYGTGYCD SQCPRDLKFI NGQANVEGWQ PSANDPNAGV GNHGSCCAEM DVWEANSIST |
| | | | AVTPHPCDTP GQTMCQGDDC GGTYSSTRYA GTCDPDGCDF NPYRQGNHSF YGPGKIVDTS SKFTVVTQFI TDDGTPSGTL |
| | | | TEIKRFYVQN GKVIPQSEST ISGVTGNSIT TEYCTAQKAA FGDNTGFFTH GGLQKISQAL AQGMVLVMSL WDDHAANMLW |
| | | | LDSTYPTDAD PDTPGVARGT CPTTSGVPAD VESQNPNSYV IYSNIKVGPI NSTFTAN |
| SEQ ID NO: 90 | 15824273 | Pseudotrichonympha | MFAIVLLGLT RSLGTGTNQA ENHPSLSWQN CRSGGSCTQT SGSVVLDSNW RWTHDSSLTN CYDGNEWSSS LCPDPKTCSD |
| | | grassii | NCLIDGADYS GTYGITSSGN SLKLVFVTNG PYSTNIGSRV YLLKDESHYQ IFDLKNKEFT FTVDDSNLDC GLNGALYFVS |
| | | | MDEDGGTSRF SSNKAGAKYG TGYCDAQCPH DIKFINGEAN VENWKPQTND ENAGNGRYGA CCTEMDIWEA NKYATAYTPH |
| | | | ICTVNGEYRC DGSECGDTDS GNRYGGVCDK DGCDFNSYRM GNTSFWGPGL IIDTGKPVTV VTQFVTKDGT DNGQLSEIRR |
| | | | KYVQGGKVIE NTVVNIAGMS SGNSITDDFC NEQKSAFGDT NDFEKKGGLS GLGKAFDYGM VLVLSLWDDH QVNMLWLDSI |
| | | | YPTDQPASQP GVKRGPCATS SGAPSDVESQ HPDSSVTFSD IRFGPIDSTY |
| SEQ ID NO: 91 | 115390801 | Aspergillus terreus | MHQRALLFSA LVGAVRAQQA GTLTEEVHPP LTWQKCTADG SCTEQSGSVV IDSNWRWLHS TNGSTNCYTG NTWDESLCPD |
| | | NIH2624 | NEACAANCAL DGADYESTYG ITTSGDALTL TFVTGENVGS RVYLMAEDDE SYQTFDLVGN EFTFDVDVSN LPCGLNGALY |
| | | | FTSMDADGGV SKYPANKAGA KYGTGYCDSQ CPRDLKFING MANVEGWTPS DNDKNAGVGG HGSCCPELDI WEANSISSAF |
| | | | TPHPCDDLGQ TMCSGDDCGG TYSETRYAGT CDPDGCDFNA YRMGNTSYYG PDKIVDTNSV MTVVTQFIGD GGSLSEIKRL |
| | | | YVQNGKVIAN AQSNVDGVTG NSITSDFCTA QKTAFGDQDI FSKHGGLSGM GDAMSAMVLI LSIWDDHNSS MMWLDSTYPE |
| | | | DADASEPGVA RGTCEHGVGD PETVESQHPG ATVTFSKIKF GPIGSTYSSN STA |
| SEQ ID NO: 92 | 453223 | Phanerochaete | MFRAAALLAF TCLAMVSGQQ AGTNTAENHP QLQSQQCTTS GGCKPLSTKV VLDSNWRWVH STSGYTNCYT GNEWDTSLCP |
| | | chrysosporium | DGKTCAANCA LDGADYSGTY GITSTGTALT LKFVTGSNVG SRVYLMADDT HYQLLKLLNQ EFTFDVDMSN LPCGLNGALY |
| | | | LSAMDADGGM SKYPGNKAGA KYGTGYCDSQ CPKDIKFING EANVGNWTET GSNTGTGSYG TCCSEMDIWE ANNDAAAFTP |
| | | | HPCTTTGQTR CSGDDCARNT GLCDGDGCDF NSFRMGDKTF LGKGMTVDTS KPFTVVTQFL TNDNTSTGTL SEIRRIYIQN |
| | | | GKVIQNSVAN IPGVDPVNSI TDNFCAQQKT AFGDTNWFAQ KGGLKQMGEA LGNGMVLALS IWDDHAANML WLDSDYPTDK |
| | | | DPSAPGVARG TCATTSGVPS DVESQVPNSQ VVFSNIKFGD IGSTFSGTSS PNPPGGSTTS SPVTTSPTPP PTGPTVPQWG |
| | | | QCGGIGYSGS TTCASPYTCH VLNPCESILS LQRSSNADQY LQTTRSATKR RLDTALQPRK |
| SEQ ID NO: 93 | 3132 | Phanerochaete | MRTALALILA LAAFSAVSAQ QAGTITAETH PTLTIQQCTQ SGGCAPLTTK VVLDVNWRWI HSTTGYTNCY SGNTWDAILC |
| | | chrysosporium | PDPVTCAANC ALDGADYTGT FGILPSGTSV TLRPVDGLGL RLFLLADDSH YQMFQLLNKE FTFDVEMPNM RCGSSGAIHL |
| | | | TAMDADGGLA KYPGNQAGAK YGTGFCSAQC PKGVKFINGQ ANVEGWLGTT ATTGTGFFGS CCTDIALWEA NDNSASFAPH |
| | | | PCTTNSQTRC SGSDCTADSG LCDADGCNFN SFRMGNTTFF GAGMSVDTTK LFTVVTQFIT SDNTSMGALV EIHRLYIQNG |
| | | | QVIQNSVVNI PGINPATSIT DDLCAQENAA FGGTSSFAQH GGLAQVGEAL RSGMVLALSI VNSAADTLWL DSNYPADADP |
| | | | SAPGVARGTC PQDSASIPEA PTPSVVFSNI KLGDIGTTFG AGSALFSGRS PPGPVPGSAP ASSATATAPP FGSQCGGLGY |
| | | | AGPTGVCPSP YTCQALNIYY SQCI |
| SEQ ID NO: 94 | 16304152 | Thermoascus | MYQRALLFSF FLAAARAHEA GTVTAENHPS LTWQQCSSGG SCTTQNGKVV IDANWRWVHT TSGYTNCYTG NTWDTSICPD |
| | | aurantiacus | DVTCAQNCAL DGADYSGTYG VTTSGNALRL NFVTQSSGKN IGSRLYLLQD DTTYQIFKLL GQEFTFDVDV SNLPCGLNGA |
| | | | LYFVAMDADG NLSKYPGNKA GAKYGTGYCD SQCPRDLKFI NGQANVEGWQ PSANDPNAGV GNHGSSCAEM DVWEANSIST |
| | | | AVTPHPCDTP GQTMCQGDDC GGTYSSTRYA GTCDTDGCDF NPYQPGNHSF YGPGKIVDTS SKFTVVTQFI TDDGTPSGTL |
| | | | TEIKRFYVQN GKVIPQSEST ISGVTGNSIT TEYCTAQKAA FDNTGFFTHG GLQKISQALA QGMVLVMSLW DDHAANMLWL |
| | | | DSTYPTDADP DTPGVARGTC PTTSGVPADV ESQNPNSYVI YSNIKVGPIN STFTAN |
| SEQ ID NO: 95 | 156712280 | Acremonium | MHKRAATLSA LVVAAAGFAR GQGVGTQQTE THPKLTFQKC SAAGSCTTQN GEVVIDANWR WVHDKNGYTN CYTGNEWNTT |
| | | thermophilum | ICADAASCAS NCVVDGADYQ GTYGASTSGN ALTLKFVTKG SYATNIGSRM YLMASPTKYA MFTLLGHEFA FDVDLSKLPC |
| | | | GLNGAVYFVS MDEDGGTSKY PSNKAGAKYG TGYCDSQCPR DLKFIDGKAN SASWQPSSND QNAGVGGMGS CCAEMDIWEA |
| | | | NSVSAAYTPH PCQNYQQHSC SGDDCGGTYS ATRFAGDCDP DGCDWNAYRM GVHDFYGNGK TVDTGKKFSI VTQFKGSGST |
| | | | LTEIKQFYVQ DGRKIENPNA TWPGLEPFNS ITPDFCKAQK QVFGDPDRFN DMGGFTNMAK ALANPMVLVL SLWDDHYSNM |
| | | | LWLDSTYPTD ADPSAPGKGR GTCDTSSGVP SDVESKNGDA TVIYSNIKFG PLDSTYTAS |
| SEQ ID NO: 96 | 5231154 | Volvariella | MRASLLAFSL NSAAGQQAGT LQTKNHPSLT SQKCRQGGCP QVNTTIVLDA NWRWTHSTSG STNCYTGNTW QATLCPDGKT |
| | | volvacea | CAANCALDGA DYTGTYGVTT SGNSLTLQFV TQSNVGARLG YLMADDTTYQ MFNLLNQEFW FDVDMSNLPC GLNGALYFSA |
| | | | MARTAAWMPM VVCASTPLIS TRRSTARLLR LPVPPRSRYG RGICDSQCPR DIKFINGEAN VQGWQPSPND TNAGTGNYGA |
| | | | CCNKMDVWEA NSISTAYTPH PCTQRGLVRC SGTACGGGSN RYGSICDHDG LGFQNLFGMG RTRVRARVGR VKQFNRSSRV |
| | | | VEPISWTKQT TLHLGNLPWK SADCNVQNGR VIQNSKVNIP GMPSTMDSVT TEFCNAQKTA FNDTFSFQQK GGMANMSEAL |
| | | | RRGMVLVLSI WDDHAANMLW LDSITSAAAC RSTPSEVHAT PLRESQIRSS HSRQTRYVTF TNIKFGPFNS TGTTYTTGSV |
| | | | PTTSTSTGTT GSSTPPQPTG VTVPQGQCGG IGYTGPTTCA SPTTCHVLNP YYSQCY |
| SEQ ID NO: 97 | 116200349 | Chaetomium | MKQYLQYLAA ALPLMSLVSA QGVGTSTSET HPKITWKKCS SGGSCSTVNA EVVIDANWRW LHNADSKNCY DGNEWTDACT |
| | | globosum CBS | SSDDCTSKCV LEGAEYGKTY GASTSGDSLS LKFLTKHEYG TNIGSRFYLM NGASKYQMFT LMNNEFAFDV DLSTVECGLN |
| | | 148-51 | SALYFVAMEE DGGMASYSTN KAGAKYGTGY CDAQCARDLK FVGGKANYDG WTPSSNDANA GVGALGGCCA EIDVWESNAH |
| | | | AFAFTPHACE NNNYHVCEDT TCGGTYSEDR FAGDCDANGC DYNPYRVGNT DFYGKGMTVD TSKKFTVVSQ FQENKLTQFF |
| | | | VQNGKKIEIP GPKHEGLPTE SSDITPELCS AMPEVFGDRD RFAEVGGFDA LNKALAVPMV LVMSIWDDHY ANMLWLDSSY |
| | | | PPEKAGTPGG DRGPCAQDSG VPSEVESQYP DATVVWSNIR FGPIGSTVQV |
| SEQ ID NO: 98 | 4586343 | Irpex lacteus | MFPKASLIAL SFIAAVYGQQ VGTQMAEVHP KLPSQLCTKS GCTNQNTAVV LDANWRWLHT TSGYTNCYTG NSWDATLCPD |
| | | | ATTCAQNCAV DGADYSGTYG ITTSGNALTL KFKTGTNVGS RVYLMQTDTA YQMFQLLNQE FTFDVDMSNL PCGLNGALYL |
| | | | SQMDQDGGLS KFPTNKAGAK YGTGYCDSQC PHDIKFINGM ANVAGWAGSA SDPNAGSGTL GTCCSEMDIW EANNDAAAFT |
| | | | PHPCSVDGQT QCSGTQCGDD DERYSGLCDK DGCDFNSFRM GDKSFLGKGM TVDTSRKFTV VTQFVTTDGT TNGDLHEIRR |
| | | | LYVQDGKVIQ NSVVSIPGID AVDSITDNFC AQQKSVFGDT NYFATLGGLK KMGAALKSGM VLAMSVWDDH AASMQWLDSN |
| | | | YPADGDATKP GVARGTCSAD SGLPTNVESQ SASASVTFSN IKWGDINTTF TGTGSTSPSS PAGPVSSSTS VASQPTQPAQ |
| | | | GTVAQWGQCG GTGFTGPTVC ASPFTCHVVNPYYSQCY |
| SEQ ID NO: 99 | 15321718 | Lentinula edodes | MFRTAALLSF AYLAVVYGQQ AGTSTAETHP PLTWEQCTSG GSCTTQSSSV VLDSNWRWTH VVGGYTNCYT GNEWNTTVCP |
| | | | DGTTCAANCA LDGADYEGTY GISTSGNALT LKFVTASAQT NVGSRVYLMA PGSETEYQMF NPLNQEFTFD VDVSALPCGL |
| | | | NGALYFSEMD ADGGLSEYPT NKAGAKYGTG YCDSQCPRDI KFIEGKANVE GWTPSSTSPN AGTGGTGICC NEMDIWEANS |
| | | | ISEALTPHPC TAQGGTACTG DSCSSPNSTA GICDQAGCDF NSFRMGDTSF YGPGLTVDTT SKITVVTQFI TSDNTTTGDL |
| | | | TAIRRIYVQN GQVIQNSMSN IAGVTPTNEI TTDFCDQQKT AFGDTNTFSE KGGLTGMGAA FSRGMVLVLS IWDDDAAEML |
| | | | WLDSTYPVGK TGPGAARGTC ATTSGQPDQV ETQSPNAQVV FSNIKFGAIG STFSSTGTGT GTGTGTGTGT GTTTSSAPAA |
| | | | TQTKYGQCGG QGWTGATVCA SGSTCTSSGP YYSQCL |
| SEQ ID NO: 100 | 146424875 | Pleurotus sp | MFRTAALTAF TFAAVVLGQQ VGTLTTENHP ALSIQQCTAT GCTTQQKSVV LDSNWRWTHS TAGATNCYTG NAWDPALCPD |
| | | Florida | PATCATNCAI DGADYSGTYG ITTSGNALTL RFVTNGQYSQ NIGSRVYLLD DADHYKLFDL KNQEFTFDVD MSGLPCGLNG |
| | | | ALYFSEMAAD GGKAAHAGNN AGAKYGTGYC DAQCPHDIKW INGEANVLDW SASATDDNAG NGRYGACCAE MDIWEANSEA |
| | | | TAYTPHVCRD EGLYRCSGTE CGDGNNRYGG VCDKDGCDFN SYRMGDKNFL GRGKTIDTTK KVTVVTQFIT DNNTPTGNLV |
| | | | EIRRVYVQNG VVYQNSFSTF PSLSQYNSIS DEFCVAQKTL FGDNQYYNTH GGTTKMGDAF DNGMVLIMSL WSDHAAHMLW |
| | | | LDSDYPLDKS PSEPGVSRGA CPTSSGDPDD VVANHPNASV TFSNIKYGPI GSTFGGSTPP VSSGGSSVPP VTSTTSSGTT |
| | | | TPTGPTGTVP KWGQCGGIGY SGPTACVAGS TCTYSNDWYS QCL |
| SEQ ID NO: 101 | 62006158 | Fusarium | MYRAIATASA LIAAVRAQQV CSLTPETKPA LSWSKCTSSG CSNVQGSVTI DANWRWTHQL SGSTNCYTGN KWDTSICTSG |
| | | venenatum | KVCAEKCCID GAEYASTYGI TSSGNQLSLS FVTKGTYGTN IGSRTYLMED ENTYQMFQLL GNEFTFDVDV SNIGCGLNGA |
| | | | LYFVSMDADG GKAKYPGNKA GAKYGTGYCD AQCPRDVKFI NGQANSDGWQ PSKSDVNGGI GNLGTCCPEM DIWEANSIST |
| | | | AHTPHPCTKL TQHSCTGDSC GGTYSEDRYG GTCDADGCDF NAYRQGNKTF YGPGSGFNVD TTKKVTVVTQ FHKGSNGRLS |
| | | | EITRLYVQNG KVIANSESKI AGVPGSSLTP EFCTAQKKVF GDIDDFEKKG AWGGMSDALE APMVLVMSLW HDHHSNMLWL |
| | | | DSTYPTDSTK LGAQRGSCST SSGVPADLEK NVPNSKVAFS NIKFGPIGST YKEGQPEPTN PTNPNPTTPG GTVDQWGQCG |
| | | | GTNYSGPTAC KSPFTCKKIN DFYSQCQ |
| SEQ ID NO: 102 | 296027 | Phanerochaete | MFRTATLLAF TMAAMVFGQQ VGTNTAENHR TLTSQKCTKS GGCSNLNTKI VLDANWRWLH STSGYTNCYT GNQWDATLCP |
| | | chrysosporium | DGKTCAANCA LDGADYTGTY GITASGSSLK LQFVTGSNVG SRVYLMADDT HYQMFQLLNQ EFTFDVDMSN LPCGLNGALY |
| | | | LSAMDADGGM AKYPTNKAGA KYGTGYCDSQ CPRDIKFING EANVEGWNAT SANAGTGNYG TCCTEMDIWE ANNDAAAYTP |
| | | | HPCTTNAQTR CSGSDCTRDT GLCDADGCDF NSFRMGDQTF LGKGLTVDTS KPFTVVTQFI TNDGTSAGTL TEIRRLYVQN |
| | | | GKVIQNSSVK IPGIDLVNSI TDNFCSQQKT AFGDTNYFAQ HGGLKQVGEA LRTGMVLALS IWDDYAANML WLDSNYPTNK |
| | | | DPSTPGVARG TCATTSGVPA QIEAQSPNAY VVFSNIKFGD LNTTYTGTVS SSSVSSSHSS TSTSSSHSSS STPPTQPTGV |
| | | | TVPQWGQCGG IGYTGSTTCA SPYTCHVLNP YYSQCY |
| SEQ ID NO: 103 | 154449709 | Fusicoccum sp | MYQTSLLASL SFLLATSQAQ QVGTQTAETH PKLTTQKCTT AGGCTDQSTS IVLDANWRWL HTVDGYTNCY TGQEWDTSIC |
| | | BCC4124 | TDGKTCAEKC ALDGADYEST YGISTSGNAL TMNFVTKSSQ TNIGGRVYLL AADSDDTYEL FKLKNQEFTF DVDVSNLPCG |
| | | | LNGALYFSEM DSDGGLSKYT TNKAGAKYGT GYCDTQCPHD IKFINGEANV QNWTASSTDK NAGTGHYGSC CNEMDIWEAN |
| | | | SQATAFTPHV CEAKVEGQYR CEGTECGDGD NRYGGVCDKD GCDFNSYRMG NETFYGSNGS TIDTTKKFTV VTQFITADNT |
| | | | ATGALTEIRR KYVQNDVVIE NSYADYETLS KFNSITDDFC AAQKTLSGDT NDFKTKGGIA RMGESFERGM VLVMSVWDDH |
| | | | AANALWLDSS YPTDADASKP GVKRGPCSTS SGVPSDVEAN DADSSVIYSN IRYGDIGSTF NKTA |
| SEQ ID NO: 104 | 169859460 | Coprinopsis | MFSKVALTAL CFLAVAQAQQ VGREVAENHP RLPWQRCTRN GGCQTVSNGQ VVLDANWRWL HVTDGYTNCY TGNAWNSSVC |
| | | cinerea okayama | SDGATCAQRC ALEGANYQQT YGITTSGDAL TIKFLTRSEQ TNIGARVYLM ENEDRYQMFN LLNKEFTFDV DVSKVPCGIN |
| | | | GALYFIQMDA DGGLSSQPNN RAGAKYGTGY CDSQCPRDIK FINGEANSVG WEPSETDPNA GKGQYGICCA EMDIWEANSI |
| | | | SNAYTPHPCQ TVNDGGYQRC QGRDCNQPRY EGLCDPDGCD YNPFRMGNKD FYGPGKTVDT NRKMTVVTQF ITHDNTDTGT |
| | | | LVDIRRLYVQ DGRVIANPPT NFPGLMPAHD SITQEFCDDA KRAFEDNDSF GRNGGLAHMG RSLAKGHVLA LSIWNDHTAH |
| | | | MLWLDSNYPT DADPNKPGIA RGTCPTTGGS PRDTEQNHPD AQVIFSNIKF GDIGSTFSGN |
| SEQ ID NO: 105 | 50400675 | Trichoderma | MYRKLAVISA FLAAARAQQV CTQQAETHPP LTWQKCTASG CTPQQGSVVL DANWRWTHDT KSTTNCYDGN TWSSTLCPDD |
| | | harzianum | ATCAKNCCLD GANYSGTYGV TTSGDALTLQ FVTASNVGSR LYLMANDSTY QEFTLSGNEF SFDVDVSQLP CGLNGALYFV |
| | | (anamorph of | SMDADGGQSK YPGNAAGAKY GTGYCDSQCP RDLKFINGQA NVEGWEPSSN NANTGVGGHG SCCSEMDIWE ANSISEALTP |
| | | Hypocrea lixii) | HPCETVGQTM CSGDSCGGTY SNDRYGGTCD PDGCDWNPYR LGNTSFYGPG SSFALDTTKK LTVVTQFATD GSISRYYVQN |
| | | | GVKFQQPNAQ VGSYSGNTIN TDYCAAEQTA FGGTSFTDKG GLAQINKAFQ GGMVLVMSLW DDYAVNMLWL DSTYPTNATA |
| | | | STPGAKRGSC STSSGVPAQV EAQSPNSKVI YSNIRFGPIG STGGNTGSNP PGTSTTRAPP SSTGSSPTAT QTHYGQCGGT |
| | | | GWTGPTRCAS GYTCQVLNPF YSQCL |
| SEQ ID NO: 106 | 729649 | Neurospora crassa | MRASLLAFSL AAAVAGGQQA GTLTAKRHPS LTWQKCTRGG CPTLNTTMVL DANWRWTHAT SGSTKCYTGN KWQATLCPDG |
| | | (OR74A) | KSCAANCALD GADYTGTYGI TGSGWSLTLQ FVTDNVGARA YLMADDTQYQ MLELLNQELW FDVDMSNIPC GLNGALYLSA |
| | | | MDADGGMRKY PTNKAGAKYA TGYCDAQCPR DLKYINGIAN VEGWTPSTND ANGIGDHGSC CSEMDIWEAN KVSTAFTPHP |
| | | | CTTIEQHMCE GDSCGGTYSD DRYGVLCDAD GCDFNSYRMG NTTFYGEGKT VDTSSKFTVV TQFIKDSAGD LAEIKAFYVQ |
| | | | NGKVIENSQS NVDGVSGNSI TQSFCKSQKT AFGDIDDFNK KGGLKQMGKA LAQAMVLVMS IWDDHAANML WLDSTYPVPK |
| | | | VPGAYRGSGP TTSGVPAEVD ANAPNSKVAF SNIKFGHLGI SPFSGGSSGT PPSNPSSSAS PTSSTAKPSS TSTASNPSGT |
| | | | GAAHWAQCGG IGFSGPTTCP EPYTCAKDHD IYSQCV |
| SEQ ID NO: 107 | 119472134 | Neosartorya | MLASTFSYRM YKTALILAAL LGSGQAQQVG TSQAEVHPSM TWQSCTAGGS CTTNNGKVVI DANWRWVHKV GDYTNCYTGN |
| | | fischeri NRRL 181 | TWDKTLCPDD ATCASNCALE GANYQSTYGA TTSGDSLRLN FVTTSQQKNI GSRLYMMKDD TTYEMFKLLN QEFTFDVDVS |
| | | | NLPCGLNGAL YFVAMDADGG MSKYPTNKAG AKYGTGYCDS QCPRDLKFIN GQANVEGWQP SSNDANAGTG NHGSCCAEMD |
| | | | IWEANSISTA FTPHPCDTPG QVMCTGDACG GTYSSDRYGG TCDPDGCDFN SFRQGNKTFY GPGMTVDTKS KFTVVTQFIT |
| | | | DDGTASGTLK EIKRFYVQNG KVIPNSESTW SGVGGNSITN DYCTAQKSLF KDQNVFAKHG GMEGMGAALA QGMVLVMSLW |
| | | | DDHAANMLWL DSNYPTTASS STPGVARGTC DISSGVPADV EANHPDASVV YSNIKVGPIG STFNSGGSNP GGGTTTTAKP |
| | | | TTTTTTAGSP GGTGVAQHYG QCGGNGWQGP TTCASPYTCQ KLNDFYSQCL |
| SEQ ID NO: 108 | 117935080 | Chaetomium | MQIKQYLQYL AAALPLVNMA AAQRAGTQQT ETHPRLSWKR CSSGGNCQTV NAEIVIDANW RWLHDSNYQN CYDGNRWTSA |
| | | thermophilum | CSSATDCAQK CYLEGANYGS TYGVSTSGDA LTLKFVTKHE YGTNIGSRVY LMNGSDKYQM FTLMNNEFAF DVDLSKVECG |
| | | | LNSALYFVAM EEDGGMRSYS SNKAGAKYGT GYCDAQCARD LKFVGGKANI EGWRPSTNDA NAGVGPYGAC CAEIDVWESN |
| | | | AYAFAFTPHG CLNNNYHVCE TSNCGGTYSE DRFGGLCDAN GCDYNPYRMG NKDFYGKGKT VDTSRKFTVV TRFEENKLTQ |
| | | | FFIQDGRKID IPPPTWPGLP NSSAITPELC TNLSKVFDDR DRYEETGGFR TINEALRIPM VLVMSIWDGH YASMLWLDSV |
| | | | YPPEKAGQPG AERGPCAPTS GVPAEVEAQF PNAQVIWSNI RFGPIGSTYQ V |
| SEQ ID NO: 109 | 154300584 | Botryotinia | MTSRIALVSL FAAVYGQQVG TYQTETHPSL TWQSCTAKGS CTTNTGSIVL DGNWRWTHGV GTSTNCYTGN TWDATLCPDD |
| | | fuckeliana B05-10 | ATCAQNCALE GADYSGTYGI TTSGNSLRLN FVTQSANKNI GSRVYLMADT THYKTFNLLN QEFTFDVDVS NLPCGLNGAV |
| | | | YFANLPADGG ISSTNTAGAE YGTGYCDSQC PRDMKFIKGQ ANVDGWVPSS NNANTGVGNH GSCCAEMDIW EANSISTAVT |
| | | | PHSCDTVTQT VCTGDDCGGT YSSSRYAGTC DPDGCDFNSY RMGDETFYGP GKTVDTNSVF TVVTQFLTTD GTASGTLNEI |
| | | | KRFYVQDGKV IPNSYSTISG VSGNSITTPF CDAQKTAFGD PTSFSDHGGL ASMSAAFEAG MVLVLSLWDD YYANMLWLDS |
| | | | TYPVGKTSAG GPRGTCDTSS GVPASVEASS PNAYVVYSNI KVGAINSTYG |
| SEQ ID NO: 110 | 15824271 | Pseudotrichonympha | MFVFVLLWLT QSLGTGTNQA ENHPSLSWQN CRSGGSCTQT SGSVVLDSNW RWTHDSSLTN CYDGNEWSSS LCPDPKTCSD |
| | | grassii | NCLIDGADYS GTYGITSSGN SLKLVFVTNG PYSTNIGSRV YLLKDESHYQ IFDLKNKEFT FTVDDSNLDC GLNGALYFVS |
| | | | MDEDGGTSRF SSNKAGAKYG TGYCDAQCPH DIKFINGEAN VENWKPQTND ENAGNGRYGA CCTEMDIWEA NKYATAYTPH |
| | | | ICTVNGEYRC DGSECGDTDS GNRYGGVCDK DGCDFNSYRM GNTSFWGPGL IIDTGKPVTV VTQFVTKDGT DNGQLSEIRR |
| | | | KYVQGGKVIE NTVVNIAGMS SGNSITDDFC NEQKSAFGDT NDFEKKGGLS GLGKAFDYGM VLVLSLWDDH QVNMLWLDSI |
| | | | YPTDQPASQP GVKRGPCATS SGAPSDVESQ HPDSSVTFSD IRFGPIDSTY |
| SEQ ID NO: 111 | 4586345 | Irpex lacteus | MFRKAALLAF SFLAIAHGQQ VGTNQAENHP SLPSQKCTAS GCTTSSTSVV LDANWRWVHT TTGYTNCYTG QTWDASICPD |
| | | | GVTCAKACAL DGADYSGTYG ITTSGNALTL QFVKGTNVGS RVYLLQDASN YQMFQLINQE FTFDVDMSNL PCGLNGAVYL |
| | | | SQMDQDGGVS RFPTNTAGAK YGTGYCDSQC PRDIKFINGE ANVEGWTGSS TDSNSGTGNY GTCCSEMDIW EANSVAAAYT |
| | | | PHPCSVNQQT RCTGADCGQG DDRYDGVCDP DGCDFNSFRM GDQTFLGKGL TVDTSRKFTI VTQFISDDGT TSGNLAEIRR |
| | | | FYVQDGNVIP NSKVSIAGID AVNSITDDFC TQQKTAFGDT NRFAAQGGLK QMGAALKSGM VLALSLWDDH AANMLWLDSD |
| | | | YPTTADASNP GVARGTCPTT SGFPRDVESQ SGSATVTYSN IKWGDLNSTF TGTLTTPSGS SSPSSPASTS GSSTSASSSA |
| | | | SVPTQSGTVA QWAQCGGIGY SGATTCVSPY TCHVVNAYYS QCY |
| SEQ ID NO: 112 | 46241268 | Gibberella | MYRAIATASA LIAAARAQQV CTLTTETKPA LTWSKCTSSG CTDVKGSVGI DANWRWTHQT SSSTNCYTGN KWDTSVCTSG |
| | | avenacea | ETCAQKCCLD GADYAGTYGI TSSGNQLSLG FVTKGSFSTN IGSRTYLMEN ENTYQMFQLL GNEFTFDVDV SNIGCGLNGA |
| | | | LYFVSMDADG GKARYPANKA GAKYGTGYCD AQCPRDVKFI NGKANSDGWK PSDSDINAGI GNMGTCCPEM DIWEANSIST |
| | | | AFTPHPCTKL TQHACTGDSC GGTYSNDRYG GTCDADGCDF NSYRQGNKTF YGRGSDFNVD TTKKVTVVTQ FKKGSNGRLS |
| | | | EITRLYVQNG KVIANSESKI PGNSGSSLTA DFCSKQKSVF GDIDDFSKKG GWSGMSDALE SPPMVLVMSL WHDHHSNMLW |
| | | | LDSTYPTDST KLGAQRGSCA TTSGVPSDLE RDVPNSKVSF SNIKFGPIGS TYSSGTTNPP PSSTDTSTTP TNPPTGGTVG |
| | | | QYGQCGGQTY TGPKDCKSPY TCKKINDFYS QCQ |
| SEQ ID NO: 113 | 6164684 | Aspergillus niger | MSSFQIYRAA LLLSILATAN AQQVGTYTTE THPSLTWQTC TSDGSCTTND GEVVIDANWR WVHSTSSATN CYTGNEWDTS |
| | | | ICTDDVTCAA NCALDGATYE ATYGVTTSGS ELRLNFVTQG SSKNIGSRLY LMSDDSNYEL FKLLGQEFTF DVDVSNLPCG |
| | | | LNGALYFVAM DADGGTSEYS GNKAGAKYGT GYCDSQCPRD LKFINGEANC DGWEPSSNNV NTGVGDHGSC CAEMDVWEAN |
| | | | SISNAFTAHP CDSVSQTMCD GDSCGGTYSA SGDRYSGTCD PDGCDYNPYR LGNTDFYGPG LTVDTNSPFT VVTQFITDDG |
| | | | TSSGTLTEIK RLYVQNGEVI ANGASTYSSV NGSSITSAFC ESEKTLFGDE NVFDKHGGLE GMGEAMAKGM VLVLSLWDDY |
| | | | AADMLWLDSD YPVNSSASTP GVARGTCSTD SGVPATVEAE SPNAYVTYSN IKFGPIGSTY SSGSSSGSGS SSSSSSTTTK |
| | | | ATSTTLKTTS TTSSGSSSTS AAQAYGQCGG QGWTGPTTCV SGYTCTYENA YYSQCL |
| SEQ ID NO: 114 | 6164682 | Aspergillus niger | MHQRALLFSA LLTAVRAQQA GTLTEEVHPS LTWQKCTSEG SCTEQSGSVV IDSNWRWTHS VNDSTNCYTG NTWDATLCPD |
| | | | DETCAANCAL DGADYESTYG VTTDGDSLTL KFVTGSNVGS RLYLMDTSDE GYQTFNLLDA EFTFDVDVSN LPCGLNGALY |
| | | | FTAMDADGGV SKYPANKAGA KYGTGYCDSQ CPRDLKFIDG QANVDGWEPS SNNDNTGIGN HGSCCPEMDI WEANKISTAL |
| | | | TPHPCDSSEQ TMCEGNDCGG TYSDDRYGGT CDPDGCDFNP YRMGNDSFYG PGKTIDTGSK MTVVTQFITD GSGSLSEIKR |
| | | | YYVQNGNVIA NADSNISGVT GNSITTDFCT AQKKAFGDED IFAEHNGLAG ISDAMSSMVL ILSLWDDYYA SMEWLDSDYP |
| | | | ENATATDPGV ARGTCDSESG VPATVEGAHP DSSVTFSNIK FGPINSTFSA SA |
| SEQ ID NO: 115 | 33733371 | Chrysosporium | MYAKFATLAA LVAGAAAQNA CTLTAENHPS LTWSKCTSGG SCTSVQGSIT IDANWRWTHR TDSATNCYEG NKWDTSYCSD |
| | | lucknowense | GPSCASKCCI DGADYSSTYG ITTSGNSLNL KFVTKGQYST NIGSRTYLME SDTKYQMFQL LGNEFTFDVD VSNLGCGLNG |
| | | U.S. Pat. No. 6,573,086-10 | ALYFVSMDAD GGMSKYSGNK AGAKYGTGYC DSQCPRDLKF INGEANVENW QSSTNDANAG TGKYGSCCSE MDVWEANNMA |
| | | | AAFTPHPCXV IGQSRCEGDS CGGTYSTDRY AGICDPDGCD FNSYRQGNKT FYGKGMTVDT TKKITVVTQF LKNSAGELSE |
| | | | IKRFYVQNGK VIPNSESTIP GVEGNSITQD WCDRQKAAFG DVTDXQDKGG MVQMGKALAG PMVLVMSIWD DHAVNMLWLD |
| | | | STWPIDGAGK PGAERGACPT TSGVPAEVEA EAPNSNVIFS NIRFGPIGST VSGLPDGGSG NPNPPVSSST PVPSSSTTSS |
| | | | GSSGPTGGTG VAKHYEQCGG IGFTGPTQCE SPYTCTKLND WYSQCL |
| SEQ ID NO: 116 | 29160311 | Thielavia | MYAKFATLAA LVAGASAQAV CSLTAETHPS LTWQKCTAPG SCTNVAGSIT IDANWRWTHQ TSSATNCYSG SKWDSSICTT |
| | | australiensis | GTDCASKCCI DGAEYSSTYG ITTSGNALNL KFVTKGQYST NIGSRTYLME SDTKYQMFKL LGNEFTFDVD VSNLGCGLNG |
| | | | ALYFVSMDAD GGMSKYSGNK AGAKYGTGYC DAQCPRDLKF INGEANVEGW ESSTNDANAG SGKYGSCCTE MDVWEANNMA |
| | | | TAFTPHPCTT IGQTRCEGDT CGGTYSSDRY AGVCDPDGCD FNSYRQGNKT FYGKGMTVDT TKKITVVTQF LKNSAGELSE |
| | | | IKRFYAQDGK VIPNSESTIA GIPGNSITKA YCDAQKTVFQ NTDDFTAKGG LVQMGKALAG DMVLVMSVWD DHAVNMLWLD |
| | | | STYPTDQVGV AGAERGACPT TSGVPSDVEA NAPNSNVIFS NIRFGPIGST VQGLPSSGGT SSSSSAAPQS TSTKASTTTS |
| | | | AVRTTSTATT KTTSSAPAQG TNTAKHWQQC GGNGWTGPTV CESPYKCTKQ NDWYSQCL |
| SEQ ID NO: 117 | 146197087 | uncultured | MLTLVYFLLS LVVSLEIGTQ QSEDHPKLTW QNGSSSVSGS IVLDSNWRWV HDSGTTNCYD GNLWSKDLCP SSDTCSQKCY |
| | | symbiotic protist | IEGADYSGTY GIQSSGSKLT LKFVTKGSYS TNIGSRVYLL KDENTYESFK LKNKEFTFTV DDSKLNCGLN GALYFVAMDA |
| | | of Reticulitermes | DGGKAKYSSF KPGAKYGMGY CDAQCPHDMK FISGKANVDD WKPQDNDENS GNGKLGTCCS EMDIWEGNMK SQAYTVHACT |
| | | speratus | KSGQYECTGQ QCGDTDSGDR FKGTCDKDGC DYASWRWGDQ SFYGEGKTVD TKQPVTVVTQ FIGDPLTEIR RLYVQGGKTI |
| | | | NNSKTSNLAD TYDSITDKFC DATKEASGDT NDFKAKGAMS GFSTNLNNGQ VLVMSLWDDH TANMLWLDST YPTDSSDSTA |
| | | | QRGPCPTSSG VPKDVESQHG DATVVFSDIK FGAINSTFKY N |
| SEQ ID NO: 118 | 146197237 | uncultured | MLAAALFTFA CSVGVGTKTP ENHPKLNWQN CASKGSCSQV SGEVTMDSNW RWTHDGNGKN CYDGNTWISS LCPDDKTCSD |
| | | symbiotic protist | KCVLDGAEYQ ATYGIQSNGT ALTLKFVTHG SYSTNIGSRL YLLKDKSTYY VFKLNNKEFT FSVDVSKLPC GLNGALYFVE |
| | | of Neotermes | MDADGGKAKY AGAKPGAEYG LGYCDAQCPS DLKFINGEAN SEGWKPQSGD KNAGNGKYGS CCSEMDVWES NSQATALTPH |
| | | koshunensis | VCKTTGQQRC SGKSECGGQD GQDRFAGLCD EDGCDFNNWR MGDKTFFGPG LIVDTKSPFV VVTQFYGSPV TEIRRKYVQN |
| | | | GKVIENSKSN IPGIDATAAI SDHFCEQQKK AFGDTNDFKN KGGFAKLGQV FDRGMVLVLS LWDDHQVAML WLDSTYPTNK |
| | | | DKSQPGVDRG PCPTSSGKPD DVESASADAT VVYGNIKFGA LDSTY |
| SEQ ID NO: 119 | 146197067 | uncultured | MLTLVYFLLS LVVSLEIGTQ QSEDHPKLTW QNGSSSVSGS IVLDSNWRWV HDSGTTNCYD GNLWSKDLCP SSNTCSQKCY |
| | | symbiotic protist | IEGADYSGTY GIQSSGSKLT LKFVTKGSYS TNIGSRVYLL KDENTYESFK LKNKEFTFTV DDSKLNCGLN GALYFVAMDA |
| | | of Reticulitermes | DGGKAKYSSF KPGAKYGMGY CDAQCPHDMK FISGKANVDD WKPQDNDENS GNGKLGTCCS EMDIWEGNMK SQAYTVHACT |
| | | speratus | KSGQYECTGQ QCGDTDSGDR FKGTCDKDGC DYASWRWGDQ SFYGEGKTVD TKQPVTVVTQ FIGDPLTEIR RLYVQGGKTI |
| | | | NNSKTSNLAD TYDSITDKFC DATKEASGDT NDFKAKGAMS GFSTNLNNGQ VLVMSLWDDH TANMLWLDST YPTDSTKTGA |
| | | | SRGPCAVSSG VPKDVESQYG DATVIYSDIK FGAINSTFKW N |
| SEQ ID NO: 120 | 146197407 | uncultured | MILALLSLAK SLGIATNQAE THPKLTWTRY QSKGSGQTVN GEIVLDSNWR WTHHSGTNCY DGNTWSTSLC PDPTTCSNNC |
| | | symbiotic protist | DLDGADYPGT YGISTSGNSL KLGFVTHGSY STNIGSRVYL LRDSKNYEMF KLKNKEFTFT VDDSKLPCGL NGALYFVAMD |
| | | of Cryptocercus | EDGGVSKNSI NKAGAQYGTG YCDAQCPHDM KFINGEANVL DWKPQSNDEN SGNGRYGACC TEMDIWEANS MATAYTPHVC |
| | | punctulatus | TVTGLRRCEG TECGDTDANQ RYNGICDKDG CDFNSYRLGD KTFFGVGKTV DSSKPVTVVT QFVTSNGQDS GTLSEIRRKY |
| | | | VQGGKVIENS KVNIAGITAG NSVTDTFCNE QKKAFGDNND FEKKGGLGAL SKQLDAGMVL VLSLWDDHSV NMLWLDSTYP |
| | | | TNAAAGALGT ERGACATSSG APSDVESQSP DATVTFSDIK FGPIDSTY |
| SEQ ID NO: 121 | 146197157 | uncultured | MLVIALILRG LSVGTGTQQS ETHPSLSWQQ TSKGGSGQSV SGSVVLDSNW RWTHTTDGTT NCYDGNEWSS DLCPDASTCS |
| | | symbiotic protist | SNCVLEGADY SGTYGITGSG SSLKLGFVTK GSYSTNIGSR VYLLGDESHY KLFKLENNEF TFTVDDSNLE CGLNGALYFV |
| | | of Hodotermopsis | AMDEDGGASK YSGAKPGAKY GMGYCDAQCP HDMKFINGDA NVEGWKPSDN DENAGTGKWG ACCTEMDIWE ANKYATAYTP |
| | | sjoestedti | HICTKNGEYR CEGTDCGDTK DNNRYGGVCD KDGCDFNSWR MGNQSFWGPG LIIDTGKPVT VVTQFLADGG SLSEIRRKYV |
| | | | QGGKVIENTV TKISGMDEFD SITDEFCNQQ KKAFRDTNDF EKKGGLKGLG TAVDAGVVLV LSLWDDHDVN MLWLDSIYPT |
| | | | DSGSKAGADR GPCATSSGVP KDVESNYASA SVTFSDIKFG PIDSTY |
| SEQ ID NO: 122 | 146197403 | uncultured | MLLALFAFGK SLGIATNQAE NHPKLTWTRY QSKGSGQTVN GEIVLDSNWR WTHHSGTNCY DGNTWSTSLC PDPTTCSNNC |
| | | symbiotic protist | DLDGADYPGT YGISSSGNSL KLGFVTHGSY STNIGSRVYL LRDSKNYEMF KLKNKEFTFT VDDSKLPCGL NGALYFVAMD |
| | | of Cryptocercus | EDGGVSKNSI NKAGAQYGTG YCDAQCPHDM KFINGEANVL DWKPQSNDEN SGNGRYGACC TEMDIWEANS MATAYTPHVC |
| | | punctutatus | TVTGIRRCEG TECGDTDANQ RYNGICDKDG CDFNSYRLGD KSFFGVGKTV DSSKPVTVVT QFVTSNGQDS GTLSEIRRKY |
| | | | VQGGKVIENS KVNIAGMAAG NSITDTFCNE QKKAFGDNND FEKKGGLGAL SKQLDSGMVL VLSLWDDHSV NMLWLDSTYP |
| | | | TNAAAGALGT ERGACATSSG APSDVESQSP DATVTFSDIK FGPIDSTY |
| SEQ ID NO: 123 | 146197081 | uncultured | MLASVVYLVS LVVSLEIGTQ QSEEHPKLTW QNGSSSVSGS IVLDSNWRWL HDSGTTNCYD GNLWSDDLCP NADTCSSKCY |
| | | symbiotic protist | IEGADYSGTY GITSSGSKVT LKFVTKGSYS TNIGSRIYLL KDENTYETFK LKNKEFTFTV DDSKLDCGLN GALYFVAMDA |
| | | of Reticulitermes | DGGKAKYSSF KPGAKYGMGY CDAQCPHDMK FISGKANVDD WKPQDNDENS GDGKLGTCCS EMDIWEGNAK SQAYTVHACS |
| | | speratus | KSGQYECTGQ QCGDTDSGDR FKGTCDKDGC DYASWRWGDQ SFYGEGKTVD TKSPVTVVTQ FIGDPLTEIR RVYVQGGKTI |
| | | | NNSKTSNLAD TYDSITDKFC DATKDATGDT NDFKAKGAMA GFSTNLNTAQ VLVSVHCGMI IQPICCGLIR RIQRIQQKQV |
| | | | QAVDRVLCRR VFQRMLKASM VMLQSRTRTL SLELSTRPLV GISPAGRLFF F |
| SEQ ID NO: 124 | 146197413 | uncultured | MILALLVLGK SLGIATNQAE THPKLTWTRY QSKGSGSTVN GEIVLDSNWR WTHHSGTNCY DGNTWSTSLC PDPTTCSNNC |
| | | symbiotic protist | DLDGADYPGT YGISTSGNSL KLGFVTHGSY STNIGSRVYL LKDTKSYEMF KLKNKEFTFT VDDSKLPCGL NGALYFVAMD |
| | | of Cryptocercus | EDGGVSKNSI NKAGAQYGTG YCDAQCPHDM KFINGEANVL DWKPQSNDEN SGNGRYGACC TEMDIWEANS MATAYTPHVC |
| | | punctuiatus | TVTGLRRCEG TECGDTDNDQ RYNGICDKDG CDFNSYRLGD KSFFGVGKTV DSSKPVTVVT QFVTSNGQDS GTLSEIRRKY |
| | | | VQGGKVIENS KVNVAGITAG NSVTDTFCNE QKKAFGDNND FEKKGGLGAL SKQLDAGMVL VLSLWDDHSV NMLWLDSTYP |
| | | | TNAAAGALGT ERGACATSSG KPSDVESQSP DATVTFSDIK FGPIDSTY |
| SEQ ID NO: 125 | 146197309 | uncultured | MLCIGLISFV YSLGVGTNTA ETHPKLTWKN GGQTVNGEVT VDSNWRWTHT KGSTKNCYDG NLWSKDLCPD AATCGKNCVL |
| | | symbiotic protist | EGADYSGTYG VTSSGNALTL KFVTHGSYST NVGSRLYLLK DEKTYQMFNL NGKEFTFTVD VSNLPCGLNG ALYHVNMDED |
| | | of Mastotermes | GGTKRYPDNE AGAKYGTGYC DAQCPTDLKF INGIPNSDGW KPQSNDKNSG NGKYGSCCSE MDIWEANSIC SAVTPHVCDN |
| | | darwiniensis | LQQTRCQGTA CGENGGGSRF GSSCDPDGCD FNSWRMGNKT FYGPGLIVDT KSKFTVVTQF VGNPVTEIKR KYVQNGKVIE |
| | | | NSYSNIEGMD KFNSVSDKFC TAQKKAFGDT DSFTKHGGFK QLGSALAKGM VLVLSLWDDH TVNMLWLDSV YPTNSKKAGS |
| | | | DRGPCPTTSG VPADVESKSA DANVIYSDIR FGAIDSTYK |
| SEQ ID NO: 126 | 146197227 | uncultured | MLGALVALAS CIGVGTNTPE KHPDLKWTNG GSSVSGSIVV DSNWRWTHIK GETKNCYDGN LWSDKYCPDA ATCGKNCVLE |
| | | symbiotic protist | GADYSGTYGV TTSGDAATLK FVTHGQYSTN VGSRLYLLKD EKTYQMFNLV GKEFTFTVDV SNLPCGLNGA LYFVQMDSDG |
| | | of Neotermes | GMAKYPDNQA GAKYGTGYCD AQCPTDLKFI NGIPNSDGWK PQKNDKNSGN GKYGSCCSEM DIWEANSMAT AYTPHVCDKL |
| | | koshunensis | EQTRCSGSAC GQNGGGDRFS SSCDPDGCDF NSWRMGNKTF WGPGLIVDTK KPVQVVTQFV GSGGSVTEIK RKYVQGGKVI |
| | | | DNSMTNIAAM SKQYNSVSDE FCQAQKKAFG DNDSFTKHGG FRQLGATLSK GHVLVLSLWD DHDVNMLWLD SVYPTNSNKP |
| | | | GADRGPCKTS SGVPSDVESQ NADSTVKYSD IRFGAIDSTY SK |
| SEQ ID NO: 127 | 146197253 | uncultured | MLAAALFTFA CSVGVGTKTT ETHPKLNWQQ CACKGSCSQV SGEVTMDSNW RWTHDGNGKN CYDGNTWISS LCPDDKTCSD |
| | | symbiotic protist | KCVLDGAEYQ ATYGIQSNGT ALTPKFVTHG SYSTNIGSRL YLLKDKSTYY VFQLNNKEFT FSVDVSKLPC GLNGALYFVE |
| | | of Neotermes | MDADGGKSKY AGAKPGAEYG LGYCDAQCPS DLKFINGEAN SEGWKPQSGD KNAGNGKYGS CCSEMDVWES NSMATALTPH |
| | | koshunensis | VCKTTGQTRC SGKSECGGQD GQDRFAGNCD EDGCDFNNWR MGDKTFFGPG LTVDTKSPFV VVTQFYGSPV TEIRRKYVQN |
| | | | GKVIENAKSN IPGIDATNAI SDTFCEQQKK AFGDTNDFKN KGGFTKLGSV FSRGMVLVLS LWDDHQVAML WLDSTYPTNK |
| | | | DKSVPGVDRG PCPTSSGKPD DVESASGDAT VVYGNIKFGA LDSTY |
| SEQ ID NO: 128 | 146197099 | uncultured | MFGFLLSLFA LQFALEIGTQ TSESHPSITW ELNGARQSGQ IVIDSNWRWL HDSGTTNCYD GNTWSSDLCP DPEKCSQNCY |
| | | symbiotic protist | LEGADYSGTY GISASGSQLT LGFVTKGSYS TNIGSRVYLL KDENTYPMFK LKNKEFTFTV DVSNLPCGLN GALYFVAMPS |
| | | of Reticulitermes | DGGKAKYPLA KPGAKYGMGY CDAQCPHDMK FINGEANVLD WKPQSNDENA GTGRYGTCCT EMDIWEANSQ ATAYTVHACS |
| | | speratus | KNARCEGTEC GDDSASQRYN GICDKDGCDF NSWRWGNKTF FGPGLTVDSS KPVTVVTQFI GDPLTEIRRI WVQGGKVIQN |
| | | | SFTNVSGITS VDSITNTFCD ESKVATGDTN DFKAKGGMSG FSKALDTEVV LVLSLWDDHT ANMLWLDSTY PTDSTAIGAS |
| | | | RGPCATSSGD PKDVESASAN ASVKFSDIKF GALDSTY |
| SEQ ID NO: 129 | 146197409 | uncultured | MLASLLPLSN SLGTASNQAE THPKLTWTQY TGKGAGQTVN GEIVLDSNWR WTHKDGTNCY DGNTWSSSLC PDPTTCSNNC |
| | | symbiotic protist | NLDGADYPGT YGITTSGNQL KLGFVTHGSY STNIGSRVYL LRDSKNYQMF KLKNKEFTFT VDDSKLPCGL NGAVYFVAMD |
| | | of Cryptocercus | EDGGTAKHSI NKAGAQYGTG YCDAQCPHDM KFINGEANVL DWKPQSNDEN SGNGRWGARC TEMDIWEANS RATAYTPHIC |
| | | punctulatus | TKTGLYRCEG TECGDSDTNR YGGVCDKDGC DFNSYRMGDK SFFGQGKTVD SSKPVTVVTQ FITDNNQDSG KLTEIRRKYV |
| | | | QGGKVIDNSK VNIAGITAGN PITDTFCDEA KKAFGDNNDF EKKGGLSALG TQLEAGFVLV LSLWDDHSVN MLWLDSTYPT |
| | | | NASPGALGVE RGDCAITSGV PADVESQSAD ASVTFSDIKF GPIDSTY |
| SEQ ID NO: 130 | 146197315 | uncultured | MLCIGLISFV YSLGVGTNTA ETHPKLTWKN GGQTVNGEVT VDSNWRWTHT KGSTKNCYDG NLWSKDLCPD AATCGKNCVL |
| | | symbiotic protist | EGADYSGTYG VTSSGNALTL KFVTHGSYST NVGSRLYLLK DEKTYQMFNL NGKEFTFTVD VSNLPCGLSG ALYHVNMDED |
| | | of Mastotermes | GGTKRYPDNE AGAKYGTGYC DAQCPTDLKF INGIPNSDGW KPQSNDKNSG NGKYGSCCSE MDIWEANSIC SAVTPHVCDN |
| | | darwiniensis | LQQTRCQGAA CGENGGGSRF GSSCDPDGCD FNSWGMGNKT FYGPGLIVDT KSKFTVVTQF VGNPVTEIKR KYVQNGKVIE |
| | | | NSYSNIEGMD KFNSVSDKFC TAQKKAFGDT DSFTKHGGFK QLGSALAKGM VLVLSLWDDH TVNMLWLDSV YPTNSKKAGS |
| | | | DRGPCPTTSG VPADVESKSA DANVIYSDIR FGAIDSTYK |
| SEQ ID NO: 131 | 146197411 | uncultured | MILALLVLGK SLGIATNQAE THPKLTWTRY QSKGSGSTVN GEIVLDSNWR WTHHSGTNCY DGNTWSTSLC PDPTTCSNNC |
| | | symbiotic protist | DLDGADYPGT YGISTSGNSL KLGFVTHGSY STNIGSRVYL LRDSKNYEMF KLKNKEFTFT VDDSKLPCGL NGALYFVAMD |
| | | of Cryptocercus | EDGGVSKNSI NKAGAQYGTG YCDAQCPHDM KFINGEANVL DWKPQSNDEN SGNGRYGACC TEMDIWEANS MATAYTPHVC |
| | | punctulatus | TVTGLRRCEG TECGDTDNDQ RYNGICDKDG CDFNSYRLGD KSFFGVGKTV DSSKPVTVVT QFVTSNGQDS GILSETRRKY |
| | | | VQGGKVIENS KVNVAGITAG NSVTDTFCNE QKKAFGDNND FEKKGGLGAL SKQLDAGMVL VLSLWDDHSV NMLWLDSTYP |
| | | | TNAAAGALGT ERGACATSSG KPSDVESQSP DATVTFSDIK FGPIDSTY |
| SEQ ID NO: 132 | 146197161 | uncultured | MIGIVLIQTV FGIGVGTQQS ESHPSLSWQQ CSKGGSCTSV SGSIVLDSNW RWTHIPDGTT NCYDGNEWSS DLCPDPTTCS |
| | | symbiotic protist | NNCVLEGADY SGTYGISTSG SSAKLGFVTK GSYSTNIGSR VYLLGDESHY KIFDLKNKEF TFTVDDSNLE CGLNGALYFV |
| | | of Hodotermopsis | AMDEDGGASR FTLAKPGAKY GTGYCDAQCP HDIKFINGEA NVQDWKPSDN DDNAGTGHYG ACCTEMDIWE ANKYATAYTP |
| | | sjoestedti | HICTENGEYR CEGKSCGDSS DDRYGGVCDK DGCDFNSWRL GNQSFWGPGL IIDTGKPVTV VTQFVTKDGT DSGALSEIRR |
| | | | KYVQGGKTIE NTVVKISGID EVDSITDEFC NQQKQAFGDT NDFEKKGGLS GLGKAFDYGV VLVLSLWDDH DVNMLWLDSV |
| | | | YPTNPAGKAG ADRGPCATSS GDPKEVEDKY ASASVTFSDI KFGPIDSTY |
| SEQ ID NO: 133 | 146197323 | uncultured | MLVFGIVSFV YSIGVGTNTA ETHPKLTWKN GGSTTNGEVT VDSNWRWTHT KGSTKNCYDG NLWSKDLCPD AATCGKNCVL |
| | | symbiotic protist | EGADYSGTYG VTSSGDALTL KFVTHGSYST NVGSRLYLLK DEKTYQMFNL NGKEFTFTVD VSQLPCGLNG ALYFVCMDQD |
| | | of Mastotermes | GGMSRYPDNQ AGAKYGTGYC DAQCPTDLKF INGLPNSDGW KPQSNDKNSG NGKYGSCCSE MDIWEANSLA TAVTPHVCDQ |
| | | darwiniensis | VGQTRCEGRA CGENGGGDRF GSICDPDGCD FNSWRMGNKT FWGPGLIIDT KKPVTVVTQF IGSPVTEIKR EYVQGGKVIE |
| | | | NSYTNIEGMD KFNSISDKFC TAQKKAFGDN DSFTKHGGFS KLGQSFTKGQ VLVLSLWDDH TVNMLWLDSV YPTNSKKLGS |
| | | | DRGPCPTSSG VPADVESKNA DSSVKYSDIR FGSIDSTYK |
| SEQ ID NO: 134 | 146197077 | uncultured | MLSFVFLLGF GVSLEIGTQQ SENHPTLSWQ QCTSSGSCTS QSGSIVLDSN WRWVHDSGTT NCYDGNEWSS DLCPDPETCS |
| | | symbiotic protist | KNCYLDGADY SGTYGITSNG SSLKLGFVTE GSYSTNIGSR VYLKKDTNTY QIFKLKNHEF TFTVDVSNLP CGLNGALYFV |
| | | of Reticulitermes | EMEADGGKGK YPLAKPGAQY GMGYCDAQCP HDMKFINGNA NVLDWKPQET DENSGNGRYG TCCTEMDIWE ANSQATAYTP |
| | | speratus | HICTKDGQYQ CEGTECGDSD ANQRYNGVCD KDGCDFNSYR LGNKTFFGPG LIVDSKKPVT VVTQFITSNG QDSGDLTEIR |
| | | | RIYVQGGKTI QNSFTNIAGL TSVDSITEAF CDESKDLFGD TNDFKAKGGF TAMGKSLDTG VVLVLSLWDD HSVNMLWLDS |
| | | | TYPTDAAAGA LGTQRGPCAT SSGAPSDVES QSPDASVTFS DIKFGPLDST Y |
| SEQ ID NO: 135 | 146197089 | uncultured | MLTLVVYLLS LVVSLEIGTQ QSESHPALTW QREGSSASGS IVLDSNWRWV HDSGTTNCYD GNEWSTDLCP SSDTCTQKCY |
| | | symbiotic protist | IEGADYSGTY GITTSGSKLT LKFVTKGSYS TNIGSRVYLL KDENTYETFK LKNKEFTFTV DDSKLDCGLN GALYFVAMDA |
| | | of Reticulitermes | DGGKQKYSSF KPGAKYGMGY CDAQCPHDMK FISGKANVED WKPQDNDENS GNGKLGTCCS EMDIWEGNAK SQAYTVHACT |
| | | speratus | KSGQYECTGT DCGDSDSRYQ GTCDKDGCDY ASYRWGDHSF YGEGKTVDTK QPITVVTQFI GDPLTEIRRL YIQGGKVINN |
| | | | SKTQNLASVY DSITDAFCDA TKAASGDTND FKAKGAMAGF SKNLDTPQVL VLSLWDDHTA NMLWLDSTYP TDSRDATAER |
| | | | GPCATSSGVP KDVESNQADA SVVFSDIKFG AINSTYSYN |
| SEQ ID NO: 136 | 146197091 | uncultured | MFGFLLSLFA LQFALEIGTQ TSESHPSITW ELNGARQSGQ IVIDSNWRWL HDSGTTNCYD GNTWSSDLCP DPEKCSQNCY |
| | | symbiotic protist | LEGADYSGTY GISASGSQLT LGFVTKGSYS TNIGSRVYLL KDENTYQMFK LKNKEFTFTV DVSNLPCGLN GALYFVAMPS |
| | | of Reticulitermes | DGGKAKYPLA KPGAKYGMGY CDAQCPHDMK FINGEANVLD WKPQSNDENA GTGRYGTCCT EMDIWEANSQ ATAYTVHACS |
| | | speratus | KNARCEGTEC GDDSASQRYN GICDKDGCDF NSWRWGNKTF FGPGLTVDSS KPVTVVTQFI GDPLTEIRRI WVQGGKVIQN |
| | | | SFTNVSGITS VDSITNTFCD ESKVATGDTN DFKAKGGMSG FSKALDTEVV LVLSLWDDHT ANMLWLDSTY PSNSTAIGAT |
| | | | RGPCATSSGD PKNVESASAN ASVKFSDIKF GAFDSTY |
| SEQ ID NO: 137 | 146197097 | uncultured | MLALVYFLLS LVVSLEIGTQ QSEDHPKLTW QNGSSSVSGS IVLDSNWRWV HDSGTTNCYD GNLWSTDLCP SSDTCTSKCY |
| | | symbiotic protist | IEGADYSGTY GITSSGSKVT LKFVTKGSYS TNIGSRIYLL KDENTYETFK LKNKEFTFTV DDSQLNCGLN GALYFVAMDA |
| | | of Reticulitermes | DGGKAKYSSF KPGAKYGMGY CDAQCPHDMK FISGKANVDD WKPQDNDENS GNGKLGTCCS EMDIWEGNAK SQAYTVHACT |
| | | speratus | KSGQYECTGQ QCGDTDSGDR FKGTCDKDGC DYASWRWGDQ SFYGEGKTVD TKQPVTVVTQ FIGDPLTEIR RLYVQGGKTI |
| | | | NNSKTSNLAD TYDSITDKFC DATKEASGDT NDFKAKGAMS GFSTNLNTAQ VLVLSLWDDH TANMLWLDST YPTDSTKTGA |
| | | | SRGPCAVTSG VPKDVESQYG SAQVVYSDIK FGAINSTY |
| SEQ ID NO: 138 | 146197095 | uncultured | MLALVYFLLS FVVSLEIGTQ QSEDHPKLTW QNGSSSVSGS IVLDSNWRWV HDSGTTNCYD GNLWSTDLCG SSDTCSSKCY |
| | | symbiotic protist | IEGADYSGTY GISASGSKLT LKFVTKGSYS TNIGSRVYLL KDENTYETFK LKGKEFTFTV DDSKLDCGLN GALYFVAMDA |
| | | of Reticulitermes | DGGKAKYSSF KPGAKYGMGY CDAQCPHDMK FISGKANVDD WKPQDNDENS GNGKLGTCCS EMDIWEGNAK SQAYTVHACT |
| | | speratus | KSGQYECTGQ QCGDTDSGDR FKGTCDKDGC DYASWRWGDQ SFYGEGKTID TKQPVTVVTQ FIGDPLTEIR RVYVQGGKVI |
| | | | NNSKTSNLAN VYDSITDKFC DDTKDATGDT NDFKAKGAMS GFSTNLNTAQ VLVMSLWDDH TANMLWLDST YPTDSTKTGA |
| | | | SRGPCAVLSG VPKNVESQHG DATVIYSDIK FGAINSTFSY N |
| SEQ ID NO: 139 | 146197401 | uncultured | MFLALFVLGK SLGIATNQAE NHPKLTWTRY QSKGSGQTVN GEVVLDSNWR WTHHSGTNCY DGNTWSTSLC PDPQTCSSNC |
| | | symbiotic protist | DLDGADYPGT YGISSSGNSL KLGFVTHGSY STNIGSRVYL LRDSKNYEMF KLKNKEFTFT VDDSKLPCGL NGALYFVAME |
| | | of Cryptocercus | EDGGVAKNSI NKAGAQYGTG YCDAQCPHDM KFINGEANVL DWKPQSNDEN SGNGRYGACC IEMDIWEANS MATAYTPHVC |
| | | punctulatus | TVTGIHRCEG TECGDTDANQ RYNGICDKDG CDFNSYRMGD KSFFGVGKTV DSSKPVTVVT QFVTSNGQDG GTLSEIKRKY |
| | | | VQGGKVIENS KVNIAGITAV NSITDTFCNE QKKAFGDNND FEKKGGLGAL SKQLDLGMVL VLSLWDDHSV NMLWLDSTYP |
| | | | TDAAAGALGT ERGACATSSG KPSDVESQSP DASVTFSDIK FGPIDSTY |
| SEQ ID NO: 140 | 146197225 | uncultured | MLLCLLSIAN SLGVGTNTAE NHPKLSWKNG GSSVSGSVTV DANWRWTHIK GETKNCYDGN LWSDKYCPDA ATCGKNCVIE |
| | | symbiotic protist | GADYQGTYGV SSSGDGLTLT FVTHGQYSTN VGSRLYLMKD EKTYQMFNLN GKEFTFTVDV SNLPCGLNGA LYFVQMDSDG |
| | | of Neotermes | GMAKYPDNQA GAKYGTGYCD AQCPTDLKFI NGIPNSDGWK PQKNDKNSGN GKYGSCCSEM DIWEANSQAT AYTPHVCDKL |
| | | koshunensis | EQTRCSGSSC GHTGGGERFS SSCDPDGCDF NSWRMGNKTF WGPGLIVDTK KPVQVVTQFV GSGNSCTEIK RKYVQGGKVI |
| | | | DNSMSNIAGM SKQYNSVSDD FCQAQKKAFG DNDSFTKHGG FRQLGATLGK GHVLVLSLWD DHDVNMLWLD SVYPTNSNKP |
| | | | GSDRGPCKTS SGIPADVESQ AASSSVKYSD IRFGAIDSTY K |
| SEQ ID NO: 141 | 146197317 | uncultured | MLCIGLISFV YSLGVGTNTA ETHPKLTWKN GGQTVNGEVT VDSNWRWTHT KGSTKNCYDG NLWSKDLCPD AATCGKNCVL |
| | | symbiotic protist | EGADYSGTYG VTSSGNALTL KFVTHGSYST NVGSRLYLMK DEKTYQMFNL NGKEFTFTVD VSNLPCGLNG ALYHVNMDED |
| | | of Mastotermes | GGTKRYPDNE AGAKYGTGYC DAQCPTDLKF INGIPNSDGW KPQSNDKNSG NGKYGSCCSE MDIWEANSIC SAVTPHVCDT |
| | | darwiniensis | LQQTRCQGTA CGENGGGSRF GSSCDPDGCD FNSWRMGNKT FYGPGLIVDT KSKFTVVTQF VGSPVTEIKR KYVQNGKVIE |
| | | | NSFSNIEGMD KFNSISDKFC TAQKKAFGDT DSFTKHGGFK QLGSALAKGM VLVLSLWDDH TVNMLWLDSV YPTNSKKAGS |
| | | | DRGPCPTTSG VPADVESKSA NANVIYSDIR FGAIDSTYK |
| SEQ ID NO: 142 | 146197251 | uncultured | MLLCLLGIAS SLDAGTNTAE NHPQLSWKNG GSSVSGSVTV DANWRWTHIK GETKNCYDGN LWSDKYCPDA ATCGQNCVIE |
| | | symbiotic protist | GADYQGTYGV SASGNALTLT FVTHGQYSTN VGSRLYLLKD EKTYQIFNLI GKEFTFTVDV SNLPCGLNGA LYFVQMDADG |
| | | of Neotermes | GTAKYSDNKA GAKYGTGYCD AQCPTDLKFI NGIPNSDGWK PQKNDKNSGN GRYGSCCSEM DVWEANSLAT AYTPHVCDKL |
| | | koshunensis | EQVRCDGRAC GQNGGGDRFS SSCDPDGCDF NSWRLGNKTF WGPGLIVDTK QPVQVVTQWV GSGTSVTEIK RKYVQGGKVI |
| | | | DNSFTKLDSL TKQYNSVSDE FCVAQKKAFG DNDSFTKHGG FRQLGATLAK GHVLVLSLWD DHDVNMLWLD SVYPTNSNKP |
| | | | GADRGPCKTS SGVPADVESQ AASSSVKYSD IRFGAIDSTY K |
| SEQ ID NO: 143 | 146197319 | uncultured | MLGIGFVCIV YSLGVGTNTA ENHPKLTWKN SGSTTNGEVT VDSNWRWTHT KGTTKNCYDG NLWSKDLCPD AATCGKNCVL |
| | | symbiotic protist | EGADYSGTYG VTSSGDALTL KFVTHGSYST NVGSRLYLLK DEKTYQIFNL NGKEFTFTVD VSNLPCGLNG ALYFVNMDAD |
| | | of Mastotermes | GGTGRYPDNQ AGAKYGTGYC DAQCPTDLKF INGIPNSDGW KPQSNDKNSG NGKYGSCCSE MDIWEANSLA TAVTPHVCDQ |
| | | darwiniensis | VGQTRCEGRA CGENGGGDRF GSSCDPDGCD FNSWRLGNKT FWGPGLIVDT KKPVTVVTQF VGSPVTEIKR KYVQGGKVIE |
| | | | NSYTNIEGLD KFNSISDKFC TAQKKAFGDN DSFIKHGGFR QLGQSFTKGQ VLVLSLWDDH TVNMLWLDSV YPTNSKKPGA |
| | | | DRGPCPTSSG VPADVESKNA GSSVKYSDIR FGSIDSTYK |
| SEQ ID NO: 144 | 146197071 | uncultured | MATLVGILVS LFALEVALEI GTQTSESHPS LSWELNGQRQ TGSIVIDSNW RWLHDSGTTN CYDGNEWSSD LCPDPEKCSQ |
| | | symbiotic protist | NCYLEGADYS GTYGISSSGN SLQLGFVTKG SYSTNIGSRV YLLKDENTYA TFKLKNKEFT FTADVSNLPC GLNGALYFVA |
| | | of Reticulitermes | MPADGGKSKY PLAKPGAKYG MGYCDAQCPH DMKFINGEAN ILDWKPSSND ENAGAGRYGT CCTEMDIWEA NSQATAYTVH |
| | | speratus | ACSKNARCEG TECGDDDGRY NGICDKDGCD FNSWRWGNKT FFGPNLIVDS SKPVTVVTQF IGDPLTEIRR IYVQGGKVIQ |
| | | | NSFTNISGVA SVDSITDAFC NENKVATGDT NDFKAKGGMS GFSKALDTEV VLVLSLWDDH TANMLWLDST YPTDSSALGA |
| | | | SRGPCAITSG EPKDVESASA NASVKFSDIK FGAIDSTY |
| SEQ ID NO: 145 | 146197075 | uncultured | MLTLVYFLLS LVVSLEIGTQ QSESHPQLSW QNGSSSVSGS IVLDSNWRWV HDSGTTNCYD GNLWSTDLCP SSDTCTSKCY |
| | | symbiotic protist | IEGADYSGTY GITSSGSKLT LKFVTKGSYS TNIGSRVYLL KDENTYETFK LKNKEFTFTV DDSKLDCGLN GALYFVAMDA |
| | | of Reticulitermes | DGGKAKYSSF KPGAKYGMGY CDAQCPHDMK FISGKANVDD WKPQDNDENS GNGKLGTCCS EMDIWEGNAK SQAYTVHACT |
| | | speratus | KSGQYECTGQ QCGDTDSGDR FKGTCDKDGC DYASWRWGDQ SFYGEGKTVD TKQPLTVVTQ FVGDPLTEIR RVYVQGGKTI |
| | | | NNSKTSNLAD TYDSITDKFC DATKEASGDT NDFKAKGAMS GFSTNLNTAQ VLVMSLWDDH TANMLWLDST YPTDSTKTGA |
| | | | SRGPCAVSSG VPKDVESQHG DATVIYSDIK FGAINSTFKW N |
| SEQ ID NO: 146 | 146197159 | uncultured | MLSLVSIFLV GLGFSLGVGT QQSESHPSLS WQNCSAKGSC QSVSGSIVLD SNWRWLHDSG TTNCYDGNEW STDLCPDAST |
| | | symbiotic protist | CDKNCYIEGA DYSGTYGITS SGAQLKLGFV TKGSYSTNIG SRVYLLRDES HYQLFKLKNH EFTFTVDDSQ LPCGLNGALY |
| | | of Hodotermopsis | FVEMAEDGGA KPGAQYGMGY CDAQCPHDMK FITGEANVKD WKPQETDENA GNGHYGACCT EMDIWEANSQ ATAYTPHICS |
| | | sjoestedti | KTGIYRCEGT ECGDNDANQR YNGVCDKDGC DFNSYRLGNK TFWGPGLTVD SNKAMIVVTQ FTTSNNQDSG ELSEIRRIYV |
| | | | QGGKTIQNSD TNVQGITTTN KITQAFCDET KVTFGDTNDF KAKGGFSGLS KSLESGAVLV LSLWDDHSVN MLWLDSTYPT |
| | | | DSAGKPGADR GPCAITSGDP KDVESQSPNA SVTFSDIKFG PIDSTY |
| SEQ ID NO: 147 | 146197405 | uncultured | MILALLVLGK SLGIATNQAE THPKLTWTRY QSKGSGSTVN GEIVLDSNWR WTHHSGTNCY DGNTWSTSLC PDPTTCSNNC |
| | | symbiotic protist | DLDGADYPGT YGISTSGNSL KLGFVTHGSY STNIGSRVYL LKDTKSYEMF KLKNKEFTFT VDDSKLPCGL NGALYFVAMD |
| | | of Cryptocercus | EDGGVSKNSI NKAGAQYGTG YCDAQCPHDM KFINGEANVL DWKPQSNDEN SGNGRYGACC TEMDIWEANS MATAYTPHVC |
| | | punctuiatus | TVTGLRRCEG TECGDTDNDQ RYNGICDKDG CDFNSYRLGD KSFFGVGKTV DSSKPVTVVT QFVTSNGQDS GTLSEIRRKY |
| | | | VQGGKVIENS KVNVAGITAG NSVTDTFCNE QKKAFGDNND FEKKGGFGAL SKQLVAGMVL VLSLWDDHSV NMLWLDSTYP |
| | | | TNAAAGALGT ERGACATSSG KPSDVESQSP DATVTFSDIK FGPIDSTY |
| SEQ ID NO: 148 | 146197327 | uncultured | MLCVGLFGLV YSIGVGTNTQ ETHPKLSWKQ CSSGGSCTTQ QGSVVIDSNW RWTHSTKDLT NCYDGNLWDS TLCPDGTTCS |
| | | symbiotic protist | KNCVLEGADY SGTYGITSSG DSLTLKFVTH GSYSTNVGSR LYLLKDDNNY QIFNLAGKEF TFTVDVSNLP CGLNGALYFV |
| | | of Mastotermes | EMDQDGGKGK HKENEAGAKY GTGYCDAQCP TDLKFIDGIA NSDGWKPQDN DENSGNGKYG SCCSEMDIWE ANSLATAYTP |
| | | darwiniensis | HVCDTKGQKR CQGTACGENG GGDRFGSECD PDGCDFNSWR QGNKSFWGPG LIIDTKKSVQ VVTQFIGSGS SVTEIRRKYV |
| | | | QNGKVIENSY STISGTEKYN SISDDYCNAQ KKAFGDTNSF ENHGGFKRFS QHIQDMVLVL SLWDDHTVNM LWLDSVYPTN |
| | | | SNKPGADRGP CETSSGVPAD VESKSASASV KYSDIRFGPI DSTYK |
| SEQ ID NO: 149 | 146197261 | uncultured | MLLCLWSIAY SLGVGTNTAE NHPKLSWKNG GSSVSGSVTV DANWRWTHIK GETKNCYDGN LWSDKYCPDA ATCGKNCVIE |
| | | symbiotic protist | GADYQGTYGV SASGDGLTLT FVTHGQYSTN VGSRLYLMKD EKTYQIFNLN GKEFTFTVDV SNLPCGLNGA LYFVQMDSDG |
| | | of Neotermes | GMAKYPDNQA GAKYGTGYCD AQCPTDLKFI NGIPNSDGWK PQKNDKNSGN GKYGSCCSEM DIWEANSQAT AYTPHVCDKL |
| | | koshunensis | EQTRCSGSAC GHTGGGERFS SSCDPDGCDF NSWRMGNKTF WGPGLIVDTK KPVQVVTQFV GSGNSCTEIK RKYVQGGKVI |
| | | | DNSMSNIAGM TKQYNSVSDD FCQAQKKAFG DNDSFTKHGG FRQLGATLGK GHVLVLSLWD DHDVNMLWLD SVYPTNSNKP |
| | | | GSDRGPCKTS SGIPADVESQ AASSSVKYSD IRFGAIDSTY K |

TABLE 2

| Sequence | Database | | Position | Position |
|---|---|---|---|---|
| Identifier | Accession | | corresponding | corresponding |
| (SEQ ID NO:) | Number | Species of Origin | to position 268 | to position 411 |
| SEQ ID NO: 1 | BD29555* | Unknown | 273 | 422 |
| SEQ ID NO: 2 | 340514556 | Trichoderma reesei | 268 | 411 |
| SEQ ID NO: 3 | 51243029 | Penicillium occitanis | 273 | 422 |
| SEQ ID NO: 4 | 7cel (PDB) & | Trichoderma reesei | 251 | 394 |
| SEQ ID NO: 5 | 67516425 | Aspergillus nidulans FGSC A4 | 274 | 424 |
| SEQ ID NO: 6 | 46107376 | Gibberella zeae PH-1 | 268 | 415 |
| SEQ ID NO: 7 | 70992391 | Aspergillus fumigatus Af293 | 277 | 427 |
| SEQ ID NO: 8 | 121699984 | Aspergillus clavatus NRRL 1 | 277 | 427 |
| SEQ ID NO: 9 | 1906845 | Claviceps purpurea | 269 | 416 |
| SEQ ID NO: 10 | 1gpi (PDB) & | Phanerochaete chrysosporium | 240 | 391 |
| SEQ ID NO: 11 | 119468034 | Neosartorya fischeri NRRL 181 | 265 | 414 |
| SEQ ID NO: 12 | 7804883 | Leptosphaeria maculans | 256 | 401 |
| SEQ ID NO: 13 | 85108032 | Neurospora crassa N150 | 268 | 412 |
| SEQ ID NO: 14 | 169859458 | Coprinopsis cinerea okayama | 270 | 421 |
| SEQ ID NO: 15 | 154292161 | Botryotinia fuckeliana B05-10 | — | 410 |
| SEQ ID NO: 16 | 169615761 # | Phaeosphaeria nodorum SN15 | 246 | 393 |
| SEQ ID NO: 17 | 4883502 | Humicola grisea | 272 | 413 |
| SEQ ID NO: 18 | 950686 | Humicola grisea | 270 | 416 |
| SEQ ID NO: 19 | 124491660 | Chaetomium thermophilum | 272 | 413 |
| SEQ ID NO: 20 | 58045187 | Chaetomium thermophilum | 270 | 416 |
| SEQ ID NO: 21 | 169601100 # | Phaeosphaeria nodorum SN15 | 237 | 383 |
| SEQ ID NO: 22 | 169870197 | Coprinopsis cinerea okayama | 269 | 421 |
| SEQ ID NO: 23 | 3913806 | Agaricus bisporus | 263 | 414 |
| SEQ ID NO: 24 | 169611094 | Phaeosphaeria nodorum SN15 | 270 | 414 |
| SEQ ID NO: 25 | 3131 | Phanerochaete chrysosporium | — | 410 |
| SEQ ID NO: 26 | 70991503 | Aspergillus fumigatus Af293 | 265 | 414 |
| SEQ ID NO: 27 | 294196 | Phanerochaete chrysosporium | 258 | 409 |
| SEQ ID NO: 28 | 18997123 | Thermoascus aurantiacus | 268 | 418 |
| SEQ ID NO: 29 | 4204214 | Humicola grisea var thermoidea | 272 | 413 |
| SEQ ID NO: 30 | 34582632 | Trichoderma viride (also known | 268 | 411 |
| | | as Hypochrea rufa) | | |
| SEQ ID NO: 31 | 156712284 | Thermoascus aurantiacus | 268 | 418 |
| SEQ ID NO: 32 | 39977899 | Magnaporthe grisea (oryzae) 70- | 268 | 414 |
| | | 15 | | |
| SEQ ID NO: 33 | 20986705 | Talaromyces emersonii | 266 | 416 |
| SEQ ID NO: 34 | 22138843 | Aspergillus oryzae | 265 | 414 |
| SEQ ID NO: 35 | 55775695 | Penicillium chrysogenum | 276 | 426 |
| SEQ ID NO: 36 | 171676762 | Podospora anserina | 270 | 417 |
| SEQ ID NO: 37 | 146350520 | Pleurotus sp Florida | 268 | 420 |
| SEQ ID NO: 38 | 37732123 | Gibberella zeae | 268 | 415 |
| SEQ ID NO: 39 | 156055188 | Sclerotinia sclerotiorum 1980 | — | 410 |
| SEQ ID NO: 40 | 453224 | Phanerochaete chrysosporium | 258 | 409 |
| SEQ ID NO: 41 | 50402144 | Trichoderma reesei | 268 | 411 |
| SEQ ID NO: 42 | 115397177 | Aspergillus terreus NIH2624 | 274 | 424 |
| SEQ ID NO: 43 | 154312003 | Botryotinia fuckeliana B05-10 | 266 | 416 |
| SEQ ID NO: 44 | 49333365 | Volvariella volvacea | 268 | 420 |
| SEQ ID NO: 45 | 729650 | Penicillium janthinellum | 274 | 424 |
| SEQ ID NO: 46 | 146424871 | Pleurotus sp Florida | 267 | 418 |
| SEQ ID NO: 47 | 67538012 | Aspergillus nidulans FGSC A4 | 265 | 410 |
| SEQ ID NO: 48 | 62006162 | Fusarium poae | 268 | 415 |
| SEQ ID NO: 49 | 146424873 | Pleurotus sp Florida | 267 | 418 |
| SEQ ID NO: 50 | 295937 | Trichoderma viride | 268 | 411 |
| SEQ ID NO: 51 | 6179889 # | Alternaria alternata | 240 | 386 |
| SEQ ID NO: 52 | 119483864 | Neosartorya fischeri NRRL 181 | 278 | 428 |
| SEQ ID NO: 53 | 85083281 | Neurospora crassa OR74A | 270 | 412 |
| SEQ ID NO: 54 | 3913803 | Cryphonectria parasitica | 269 | 416 |
| SEQ ID NO: 55 | 60729633 | Corticium rolfsii | 265 | 415 |
| SEQ ID NO: 56 | 39971383 | Magnaporthe grisea 70-15 | 268 | 410 |
| SEQ ID NO: 57 | 39973029 | Magnaporthe grisea 70-15 | 269 | 410 |
| SEQ ID NO: 58 | 1170141 | Fusarium oxysporum | 268 | 415 |
| SEQ ID NO: 59 | 121710012 | Aspergillus clavatus NRRL 1 | 265 | 414 |
| SEQ ID NO: 60 | 17902580 | Penicillium funiculosum | 273 | 422 |
| SEQ ID NO: 61 | 1346226 | Humicola grisea var thermoidea | 270 | 416 |
| SEQ ID NO: 62 | 156712282 | Chaetomium thermophilum | 270 | 416 |
| SEQ ID NO: 63 | 169768818 | Aspergillus oryzae RIB40 | 277 | 427 |
| SEQ ID NO: 64 | 46241270 | Gibberella pulicaris | 268 | 415 |
| SEQ ID NO: 65 | 49333363 | Volvariella volvacea | 265 | 418 |
| SEQ ID NO: 66 | 46395332 | Irpex lacteus | 263 | 414 |
| SEQ ID NO: 67 | 50844407 # | Chaetomium thermophilum var | 245 | 391 |
| | | thermophilum | | |
| SEQ ID NO: 68 | 4586347 | Irpex lacteus | 264 | 415 |
| SEQ ID NO: 69 | 3980202 | Phanerochaete chrysosporium | 258 | 410 |
| SEQ ID NO: 70 | 27125837 | Melanocarpus albomyces | 273 | 414 |
| SEQ ID NO: 71 | 171696102 | Podospora anserina | 265 | 415 |
| SEQ ID NO: 72 | 3913802 | Cochliobolus carbonum | 270 | 416 |
| SEQ ID NO: 73 | 50403723 | Trichoderma viride | 268 | 411 |
| SEQ ID NO: 74 | 3913798 | Aspergillus aculeatus | 275 | 425 |
| SEQ ID NO: 75 | 66828465 | Dictyostelium discoideum | 269 | 419 |
| SEQ ID NO: 76 | 156060391 | Sclerotinia sclerotiorum 1980 | 252 | 402 |
| SEQ ID NO: 77 | 116181754 | Chaetomium globosum CBS 148- | 263 | 413 |
| | | 51 | | |
| SEQ ID NO: 78 | 145230535 | Aspergillus niger | 274 | 424 |
| SEQ ID NO: 79 | 46241266 | Nectria haematococca mpVI | 268 | 415 |
| SEQ ID NO: 80 | 1q9h (PDB) # | Talaromyces emersonii | 248 | 398 |
| SEQ ID NO: 81 | 157362170 | Polyporus arcularius | 269 | 420 |
| SEQ ID NO: 82 | 7804885 | Leptosphaeria maculans | 267 | 407 |
| SEQ ID NO: 83 | 121852 | Phanerochaete chrysosporium | 258 | 409 |
| SEQ ID NO: 84 | 126013214 | Penicillium decumbens | 264 | 415 |
| SEQ ID NO: 85 | 156048578 | Sclerotinia sclerotiorum 1980 | 265 | 413 |
| SEQ ID NO: 86 | 156712278 | Acremonium thermophilum | 269 | 414 |
| SEQ ID NO: 87 | 21449327 | Aspergillus nidulans | 265 | 410 |
| SEQ ID NO: 88 | 171683762 | Podospora anserina | 274 | 415 |
| SEQ ID NO: 89 | 56718412 | Thermoascus aurantiacus var | 268 | 418 |
| | | levisporus | | |
| SEQ ID NO: 90 | 15824273 | Pseudotrichonympha grassii | 263 | 414 |
| SEQ ID NO: 91 | 115390801 | Aspergillus terreus NIH2624 | 266 | 411 |
| SEQ ID NO: 92 | 453223 | Phanerochaete chrysosporium | 258 | 409 |
| SEQ ID NO: 93 | 3132 | Phanerochaete chrysosporium | — | 407 |
| SEQ ID NO: 94 | 16304152 | Thermoascus aurantiacus | 268 | 417 |
| SEQ ID NO: 95 | 156712280 | Acremonium thermophilum | 273 | 420 |
| SEQ ID NO: 96 | 5231154 | Volvariella volvacea | 281 | 438 |
| SEQ ID NO: 97 | 116200349 | Chaetomium globosum CBS 148- | 270 | 412 |
| | | 51 | | |
| SEQ ID NO: 98 | 4586343 | Irpex lacteus | 263 | 414 |
| SEQ ID NO: 99 | 15321718 | Lentinula edodes | — | 417 |
| SEQ ID NO: 100 | 146424875 | Pleurotus sp Florida | 267 | 418 |
| SEQ ID NO: 101 | 62006158 | Fusarium venenatum | 268 | 415 |
| SEQ ID NO: 102 | 296027 | Phanerochaete chrysosporium | 258 | 409 |
| SEQ ID NO: 103 | 154449709 | Fusicoccum sp BCC4124 | 272 | 424 |
| SEQ ID NO: 104 | 169859460 | Coprinopsis cinerea okayama | 269 | 421 |
| SEQ ID NO: 105 | 50400675 | Trichoderma harzianum | 264 | 407 |
| SEQ ID NO: 106 | 729649 | Neurospora crassa | 262 | 406 |
| SEQ ID NO: 107 | 119472134 | Neosartorya fischeri NRRL 181 | 277 | 427 |
| SEQ ID NO: 108 | 117935080 | Chaetomium thermophilum | 272 | 413 |
| SEQ ID NO: 109 | 154300584 | Botryotinia fuckeliana B05-10 | 265 | 413 |
| SEQ ID NO: 110 | 15824271 | Pseudotrichonympha grassii | 263 | 414 |
| SEQ ID NO: 111 | 4586345 | Irpex lacteus | 263 | 414 |
| SEQ ID NO: 112 | 46241268 | Gibberella avenacea | 268 | 416 |
| SEQ ID NO: 113 | 6164684 | Aspergillus niger | 274 | 424 |
| SEQ ID NO: 114 | 6164682 | Aspergillus niger | 266 | 412 |
| SEQ ID NO: 115 | 33733371 | Chrysosporium lucknowense | 269 | 415 |
| | | U.S. Pat. No. 6,573,086-10 | | |
| SEQ ID NO: 116 | 29160311 | Thielavia australiensis | 269 | 415 |
| SEQ ID NO: 117 | 146197087 | uncultured symbiotic protist of | 260 | 402 |
| | | Reticulitermes speratus | | |
| SEQ ID NO: 118 | 146197237 | uncultured symbiotic protist of | 264 | 409 |
| | | Neotermes koshunensis | | |
| SEQ ID NO: 119 | 146197067 | uncultured symbiotic protist of | 260 | 402 |
| | | Reticulitermes speratus | | |
| SEQ ID NO: 120 | 146197407 | uncultured symbiotic protist of | 261 | 412 |
| | | Cryptocercus punciulatus | | |
| SEQ ID NO: 121 | 146197157 | uncultured symbiotic protist of | 264 | 410 |
| | | Hodotermopsis sjoestedti | | |
| SEQ ID NO: 122 | 146197403 | uncultured symbiotic protist of | 261 | 412 |
| | | Cryptocercus punctulatus | | |
| SEQ ID NO: 123 | 146197081 | uncultured symbiotic protist of | 260 | 410 |
| | | Reticulitermes speratus | | |
| SEQ ID NO: 124 | 146197413 | uncultured symbiotic protist of | 261 | 412 |
| | | Cryptocercus punctulatus | | |
| SEQ ID NO: 125 | 146197309 | uncultured symbiotic protist of | 259 | 402 |
| | | Mastotermes darwiniensis | | |
| SEQ ID NO: 126 | 146197227 | uncultured symbiotic protist of | 258 | 404 |
| | | Neotermes koshunensis | | |
| SEQ ID NO: 127 | 146197253 | uncultured symbiotic protist of | 264 | 409 |
| | | Neotermes koshunensis | | |
| SEQ ID NO: 128 | 146197099 | uncultured symbiotic protist of | 258 | 401 |
| | | Reticulitermes speratus | | |
| SEQ ID NO: 129 | 146197409 | uncultured symbiotic protist of | 260 | 411 |
| | | Cryptocercus punctulatus | | |
| SEQ ID NO: 130 | 146197315 | uncultured symbiotic protist of | 259 | 402 |
| | | Mastotermes darwiniensis | | |
| SEQ ID NO: 131 | 146197411 | uncultured symbiotic protist of | 261 | 412 |
| | | Cryptocercus punctulatus | | |
| SEQ ID NO: 132 | 146197161 | uncultured symbiotic protist of | 263 | 413 |
| | | Hodotermopsis sjoestedti | | |
| SEQ ID NO: 133 | 146197323 | uncultured symbiotic protist of | 259 | 402 |
| | | Mastotermes darwiniensis | | |
| SEQ ID NO: 134 | 146197077 | uncultured symbiotic protist of | 264 | 415 |
| | | Reticulitermes speratus | | |
| SEQ ID NO: 135 | 146197089 | uncultured symbiotic protist of | 258 | 400 |
| | | Reticulitermes speratus | | |
| SEQ ID NO: 136 | 146197091 | uncultured symbiotic protist of | 258 | 401 |
| | | Reticulitermes speratus | | |
| SEQ ID NO: 137 | 146197097 | uncultured symbiotic protist of | 260 | 402 |
| | | Reticulitermes speratus | | |
| SEQ ID NO: 138 | 146197095 | uncultured symbiotic protist of | 260 | 402 |
| | | Reticulitermes speratus | | |
| SEQ ID NO: 139 | 146197401 | uncultured symbiotic protist of | 261 | 412 |
| | | Cryptocercus punctulatus | | |
| SEQ ID NO: 140 | 146197225 | uncultured symbiotic protist of | 258 | 404 |
| | | Neotermes koshunensis | | |
| SEQ ID NO: 141 | 146197317 | uncultured symbiotic protist of | 259 | 402 |
| | | Mastotermes darwiniensis | | |
| SEQ ID NO: 142 | 146197251 | uncultured symbiotic protist of | 258 | 404 |
| | | Neotermes koshunensis | | |
| SEQ ID NO: 143 | 146197319 | uncultured symbiotic protist of | 259 | 402 |
| | | Mastotermes darwiniensis | | |
| SEQ ID NO: 144 | 146197071 | uncultured symbiotic protist of | 259 | 402 |
| | | Reticulitermes speratus | | |
| SEQ ID NO: 145 | 146197075 | uncultured symbiotic protist of | 260 | 402 |
| | | Reticulitermes speratus | | |
| SEQ ID NO: 146 | 146197159 | uncultured symbiotic protist of | 260 | 410 |
| | | Hodotermopsis sjoestedti | | |
| SEQ ID NO: 147 | 146197405 | uncultured symbiotic protist of | 261 | 412 |
| | | Cryptocercus punctulatus | | |
| SEQ ID NO: 148 | 146197327 | uncultured symbiotic protist of | 264 | 408 |
| | | Mastotermes darwiniensis | | |
| SEQ ID NO: 149 | 146197261 | uncultured symbiotic protist of | 258 | 404 |
| | | Neotermes koshunensis | | |

TABLE 3

| | | | Signal | Catalytic | | Cellulose |
|---|---|---|---|---|---|---|
| | | | sequence | Domain | | Binding |
| | Database | | (SS) start | (CD) start | Linker start | Domain |
| | Accession | | and end | and end | and end | (CBD) start |
| SEQ ID NO: | Number | Species of Origin | position | position | position | and end |
| SEQ ID NO: 1 | BD29555* | Unknown | 1-25 | 26-455 | 456-493 | 494-529 |
| SEQ ID NO: 2 | 340514556 | Trichoderma reesei | 1-17 | 18-444 | 445-479 | 480-514 |
| SEQ ID NO: 3 | 51243029 | Penicillium occitanis | 1-25 | 26-455 | 456-493 | 494-529 |
| SEQ ID NO: 4 | 7cel (PDB) & | Trichoderma reesei | N/A | 1-427 | N/A | N/A |
| SEQ ID NO: 5 | 67516425 | Aspergillus nidulans | 1-23 | 24-457 | 458-490 | 491-526 |
| | | FGSC A4 | | | | |
| SEQ ID NO: 6 | 46107376 | Gibberella zeae PH-1 | 1-17 | 18-448 | 449-476 | 477-512 |
| SEQ ID NO: 7 | 70992391 | Aspergillus | 1-26 | 27-460 | 461-496 | 497-532 |
| | | fumigatus Af293 | | | | |
| SEQ ID NO: 8 | 121699984 | Aspergillus clavatus | 1-27 | 27-460 | 461-503 | 504-539 |
| | | NRRL 1 | | | | |
| SEQ ID NO: 9 | 1906845 | Claviceps purpurea | 1-19 | 20-449 | N/A | N/A |
| SEQ ID NO: 10 | 1gpi (PDB) & | Phanerochaete | N/A | 1-424 | N/A | N/A |
| | | chrysosporium | | | | |
| SEQ ID NO: 11 | 119468034 | Neosartorya fischeri | 1-17 | 18-447 | N/A | N/A |
| | | NRRL 181 | | | | |
| SEQ ID NO: 12 | 7804883 | Leptosphaeria | 1-17 | 18-434 | N/A | N/A |
| | | maculans | | | | |
| SEQ ID NO: 13 | 85108032 | Neurospora crassa | 1-17 | 18-445 | 446-485 | 486-521 |
| | | N150 | | | | |
| SEQ ID NO: 14 | 169859458 | Coprinopsis cinerea | 1-18 | 19-454 | N/A | N/A |
| | | okayama | | | | |
| SEQ ID NO: 15 | 154292161 | Botryotinia | 1-18 | 19-443 | 444-555 | 556-596 |
| | | fuckeliana B05-10 | | | | |
| SEQ ID NO: 16 | 169615761 # | Phaeosphaeria | 1 | 2-426 | N/A | N/A |
| | | nodorum SN15 | | | | |
| SEQ ID NO: 17 | 4883502 | Humicola grisea | 1-22 | 23-446 | N/A | N/A |
| SEQ ID NO: 18 | 950686 | Humicola grisea | 1-18 | 19-449 | 450-489 | 490-525 |
| SEQ ID NO: 19 | 124491660 | Chaetomium | 1-22 | 23-446 | N/A | N/A |
| | | thermophilum | | | | |
| SEQ ID NO: 20 | 58045187 | Chaetomium | 1-18 | 19-449 | 450-494 | 495-530 |
| | | thermophilum | | | | |
| SEQ ID NO: 21 | 169601100 # | Phaeosphaeria | 1 | 2-416 | N/A | N/A |
| | | nodorum SN15 | | | | |
| SEQ ID NO: 22 | 169870197 | Coprinopsis cinerea | 1-18 | 19-454 | N/A | N/A |
| | | okayama | | | | |
| SEQ ID NO: 23 | 3913806 | Agaricus bisporus | 1-18 | 19-447 | 448-470 | 471-506 |
| SEQ ID NO: 24 | 169611094 | Phaeosphaeria | 1-18 | 19-447 | N/A | N/A |
| | | nodorum SN15 | | | | |
| SEQ ID NO: 25 | 3131 | Phanerochaete | 1-19 | 20-443 | N/A | N/A |
| | | chrysosporium | | | | |
| SEQ ID NO: 26 | 70991503 | Aspergillus | 1-17 | 18-447 | N/A | N/A |
| | | fumigatus Af293 | | | | |
| SEQ ID NO: 27 | 294196 | Phanerochaete | 1-18 | 19-442 | 443-480 | 481-516 |
| | | chrysosporium | | | | |
| SEQ ID NO: 28 | 18997123 | Thermoascus | 1-17 | 18-451 | N/A | N/A |
| | | aurantiacus | | | | |
| SEQ ID NO: 29 | 4204214 | Humicola grisea var | 1-22 | 23-446 | N/A | N/A |
| | | thermoidea | | | | |
| SEQ ID NO: 30 | 34582632 | Trichoderma viride | 1-18 | 18-444 | 445-479 | 480-514 |
| | | (also known as | | | | |
| | | Hypochrea rufa) | | | | |
| SEQ ID NO: 31 | 156712284 | Thermoascus | 1-17 | 18-451 | N/A | N/A |
| | | aurantiacus | | | | |
| SEQ ID NO: 32 | 39977899 | Magnaporthe grisea | 1-17 | 18-447 | N/A | N/A |
| | | (oryzae) 70-15 | | | | |
| SEQ ID NO: 33 | 20986705 | Talaromyces | 1-18 | 19-449 | N/A | N/A |
| | | emersonii | | | | |
| SEQ ID NO: 34 | 22138843 | Aspergillus oryzae | 1-17 | 18-447 | N/A | N/A |
| SEQ ID NO: 35 | 55775695 | Penicillium | 1-25 | 26-459 | 460-494 | 495-529 |
| | | chrysogenum | | | | |
| SEQ ID NO: 36 | 171676762 | Podospora anserina | 1-18 | 19-450 | 451-492 | 493-528 |
| SEQ ID NO: 37 | 146350520 | Pleurotus sp Florida | 1-18 | 19-453 | N/A | N/A |
| SEQ ID NO: 38 | 37732123 | Gibberella zeae | 1-17 | 18-448 | 449-476 | 477-512 |
| SEQ ID NO: 39 | 156055188 | Sclerotinia | 1-18 | 19-443 | 444-546 | 547-586 |
| | | sclerotiorum 1980 | | | | |
| SEQ ID NO: 40 | 453224 | Phanerochaete | 1-18 | 19-442 | 443-474 | 475-510 |
| | | chrysosporium | | | | |
| SEQ ID NO: 41 | 50402144 | Trichoderma reesei | 1-17 | 18-444 | 445-478 | 479-513 |
| SEQ ID NO: 42 | 115397177 | Aspergillus terreus | 1-23 | 24-457 | 458-505 | 506-541 |
| | | NIH2624 | | | | |
| SEQ ID NO: 43 | 154312003 | Botryotinia | 1-17 | 18-449 | 450-480 | 481-516 |
| | | fuckeliana B05-10 | | | | |
| SEQ ID NO: 44 | 49333365 | Volvariella volvacea | 1-18 | 19-453 | N/A | N/A |
| SEQ ID NO: 45 | 729650 | Penicillium | 1-25 | 26-456 | 457-502 | 503-537 |
| | | janthinellum | | | | |
| SEQ ID NO: 46 | 146424871 | Pleurotus sp Florida | 1-18 | 19-451 | 452-487 | 488-523 |
| SEQ ID NO: 47 | 67538012 | Aspergillus nidulans | 1-17 | 18-443 | N/A | N/A |
| | | FGSC A4 | | | | |
| SEQ ID NO: 48 | 62006162 | Fusarium poae | 1-17 | 18-448 | 449-475 | 476-511 |
| SEQ ID NO: 49 | 146424873 | Pleurotus sp Florida | 1-18 | 19-451 | 452-487 | 488-523 |
| SEQ ID NO: 50 | 295937 | Trichoderma viride | 1-17 | 18-444 | 445-478 | 479-513 |
| SEQ ID NO: 51 | 6179889 # | Alternaria alternata | 1 | 2-419 | N/A | N/A |
| SEQ ID NO: 52 | 119483864 | Neosartorya fischeri | 1-26 | 27-461 | 462-499 | 500-535 |
| | | NRRL 181 | | | | |
| SEQ ID NO: 53 | 85083281 | Neurospora crassa | 1-20 | 21-445 | N/A | N/A |
| | | OR74A | | | | |
| SEQ ID NO: 54 | 3913803 | Cryphonectria | 1-18 | 19-449 | N/A | N/A |
| | | parasitica | | | | |
| SEQ ID NO: 55 | 60729633 | Corticium rolfsii | 1-18 | 19-448 | 449-492 | 493-528 |
| SEQ ID NO: 56 | 39971383 | Magnaporthe grisea | 1-17 | 18-443 | N/A | N/A |
| | | 70-15 | | | | |
| SEQ ID NO: 57 | 39973029 | Magnaporthe grisea | 1-19 | 20-443 | N/A | N/A |
| | | 70-15 | | | | |
| SEQ ID NO: 58 | 1170141 | Fusarium | 1-17 | 18-448 | 449-478 | 479-514 |
| | | oxysporum | | | | |
| SEQ ID NO: 59 | 121710012 | Aspergillus clavatus | 1-17 | 18-447 | N/A | N/A |
| | | NRRL 1 | | | | |
| SEQ ID NO: 60 | 17902580 | Penicillium | 1-25 | 26-455 | 456-493 | 494-529 |
| | | funiculosum | | | | |
| SEQ ID NO: 61 | 1346226 | Humicola grisea var | 1-18 | 19-449 | 450-489 | 490-525 |
| | | thermoidea | | | | |
| SEQ ID NO: 62 | 156712282 | Chaetomium | 1-18 | 19-449 | 450-496 | 497-532 |
| | | thermophilum | | | | |
| SEQ ID NO: 63 | 169768818 | Aspergillus oryzae | 1-25 | 26-460 | N/A | N/A |
| | | RIB40 | | | | |
| SEQ ID NO: 64 | 46241270 | Gibberella pulicaris | 1-17 | 18-448 | 449-474 | 475-510 |
| SEQ ID NO: 65 | 49333363 | Volvariella volvacea | 1-18 | 19-451 | 452-476 | 477-512 |
| SEQ ID NO: 66 | 46395332 | Irpex lacteus | 1-18 | 19-447 | 448-485 | 486-521 |
| SEQ ID NO: 67 | 50844407 # | Chaetomium | N/A | 1-424 | 425-469 | 470-505 |
| | | thermophilum var | | | | |
| | | thermophilum | | | | |
| SEQ ID NO: 68 | 4586347 | Irpex lacteus | 1-18 | 19-448 | 449-490 | 491-526 |
| SEQ ID NO: 69 | 3980202 | Phanerochaete | 1-18 | 19-443 | 444-475 | 476-511 |
| | | chrysosporium | | | | |
| SEQ ID NO: 70 | 27125837 | Melanocarpus | 1-23 | 23-447 | N/A | N/A |
| | | albomyces | | | | |
| SEQ ID NO: 71 | 171696102 | Podospora anserina | 1-17 | 17-448 | N/A | N/A |
| SEQ ID NO: 72 | 3913802 | Cochliobolus | 1-18 | 19-449 | N/A | N/A |
| | | carbonum | | | | |
| SEQ ID NO: 73 | 50403723 | Trichoderma viride | 1-17 | 18-444 | 445-479 | 480-514 |
| SEQ ID NO: 74 | 3913798 | Aspergillus | 1-22 | 23-458 | 459-505 | 506-540 |
| | | aculeatus | | | | |
| SEQ ID NO: 75 | 66828465 | Dictyostelium | 1-19 | 20-452 | N/A | N/A |
| | | discoideum | | | | |
| SEQ ID NO: 76 | 156060391 | Sclerotinia | 1-17 | 18-435 | 436-470 | 471-504 |
| | | sclerotiorum 1980 | | | | |
| SEQ ID NO: 77 | 116181754 | Chaetomium | 1-17 | 18-446 | N/A | N/A |
| | | globosum CBS 148- | | | | |
| | | 51 | | | | |
| SEQ ID NO: 78 | 145230535 | Aspergillus niger | 1-21 | 22-457 | 458-500 | 501-536 |
| SEQ ID NO: 79 | 46241266 | Nectria | 1-18 | 18-448 | 449-472 | 473-508 |
| | | haematococca mpVI | | | | |
| SEQ ID NO: 80 | 1q9h (PDB) # | Talaromyces | N/A | 1-431 | N/A | N/A |
| | | emersonii | | | | |
| SEQ ID NO: 81 | 157362170 | Polyporus | 1-18 | 19-453 | N/A | N/A |
| | | arcularius | | | | |
| SEQ ID NO: 82 | 7804885 | Leptosphaeria | 1-20 | 21-440 | N/A | N/A |
| | | maculans | | | | |
| SEQ ID NO: 83 | 121852 | Phanerochaete | 1-18 | 19-442 | 443-480 | 481-516 |
| | | chrysosporium | | | | |
| SEQ ID NO: 84 | 126013214 | Penicillium | 1-17 | 18-448 | N/A | N/A |
| | | decumbens | | | | |
| SEQ ID NO: 85 | 156048578 | Sclerotinia | 1-16 | 17-446 | N/A | N/A |
| | | sclerotiorum 1980 | | | | |
| SEQ ID NO: 86 | 156712278 | Acremonium | 1-17 | 18-447 | 448-487 | 488-523 |
| | | thermophilum | | | | |
| SEQ ID NO: 87 | 21449327 | Aspergillus nidulans | 1-17 | 18-443 | N/A | N/A |
| SEQ ID NO: 88 | 171683762 | Podospora anserina | 1-22 | 23-448 | N/A | N/A |
| SEQ ID NO: 89 | 56718412 | Thermoascus | 1-17 | 18-451 | N/A | N/A |
| | | aurantiacus var | | | | |
| | | levisporus | | | | |
| SEQ ID NO: 90 | 15824273 | Pseudotrichonympha | 1-20 | 21-447 | N/A | N/A |
| | | grassii | | | | |
| SEQ ID NO: 91 | 115390801 | Aspergillus terreus | 1-17 | 18-444 | N/A | N/A |
| | | NIH2624 | | | | |
| SEQ ID NO: 92 | 453223 | Phanerochaete | 1-18 | 19-442 | 443-474 | 475-510 |
| | | chrysosporium | | | | |
| SEQ ID NO: 93 | 3132 | Phanerochaete | 1-19 | 20-436 | 437-467 | 468-504 |
| | | chrysosporium | | | | |
| SEQ ID NO: 94 | 16304152 | Thermoascus | 1-17 | 18-450 | N/A | N/A |
| | | aurantiacus | | | | |
| SEQ ID NO: 95 | 156712280 | Acremonium | 1-21 | 22-453 | N/A | N/A |
| | | thermophilum | | | | |
| SEQ ID NO: 96 | 5231154 | Volvariella volvacea | 1-15 | 16-472 | 473-500 | 501-536 |
| SEQ ID NO: 97 | 116200349 | Chaetomium | 1-20 | 21-445 | N/A | N/A |
| | | globosum CBS 148- | | | | |
| | | 51 | | | | |
| SEQ ID NO: 98 | 4586343 | Irpex lacteus | 1-18 | 19-447 | 448-481 | 482-517 |
| SEQ ID NO: 99 | 15321718 | Lentinula edodes | 1-18 | 19-450 | 451-480 | 481-516 |
| SEQ ID NO: 100 | 146424875 | Pleurotus sp Florida | 1-18 | 19-451 | 452-487 | 488-523 |
| SEQ ID NO: 101 | 62006158 | Fusarium venenatum | 1-17 | 18-448 | 449-471 | 472-507 |
| SEQ ID NO: 102 | 296027 | Phanerochaete | 1-18 | 19-442 | 443-480 | 481-516 |
| | | chrysosporium | | | | |
| SEQ ID NO: 103 | 154449709 | Fusicoccum sp | 1-19 | 20-457 | N/A | N/A |
| | | BCC4124 | | | | |
| SEQ ID NO: 104 | 169859460 | Coprinopsis cinerea | 1-18 | 19-454 | N/A | N/A |
| | | okayama | | | | |
| SEQ ID NO: 105 | 50400675 | Trichoderma | 1-17 | 18-440 | 441-470 | 471-505 |
| | | harzianum | | | | |
| SEQ ID NO: 106 | 729649 | Neurospora crassa | 1-17 | 18-439 | 440-480 | 481-516 |
| SEQ ID NO: 107 | 119472134 | Neosartorya fischeri | 1-26 | 27-460 | 461-494 | 495-530 |
| | | NRRL 181 | | | | |
| SEQ ID NO: 108 | 117935080 | Chaetomium | 1-22 | 23-446 | N/A | N/A |
| | | thermophilum | | | | |
| SEQ ID NO: 109 | 154300584 | Botryotinia | 1-16 | 17-446 | N/A | N/A |
| | | fuckeliana B05-10 | | | | |
| SEQ ID NO: 110 | 15824271 | Pseudotrichonympha | 1-20 | 21-447 | N/A | N/A |
| | | grassii | | | | |
| SEQ ID NO: 111 | 4586345 | Irpex lacteus | 1-18 | 19-447 | 448-487 | 488-523 |
| SEQ ID NO: 112 | 46241268 | Gibberella avenacea | 1-17 | 18-449 | 450-478 | 478-513 |
| SEQ ID NO: 113 | 6164684 | Aspergillus niger | 1-21 | 22-457 | 458-500 | 501-536 |
| SEQ ID NO: 114 | 6164682 | Aspergillus niger | 1-17 | 18-445 | N/A | N/A |
| SEQ ID NO: 115 | 33733371 | Chrysosporium | 1-17 | 18-448 | 449-490 | 491-526 |
| | | lucknowense | | | | |
| | | US6573086-10 | | | | |
| SEQ ID NO: 116 | 29160311 | Thielavia | 1-18 | 18-448 | 449-502 | 503-538 |
| | | australiensis | | | | |
| SEQ ID NO: 117 | 146197087 | uncultured symbiotic | 1-22 | 23-435 | N/A | N/A |
| | | protist of | | | | |
| | | Reticulitermes | | | | |
| | | speratus | | | | |
| SEQ ID NO: 118 | 146197237 | uncultured symbiotic | 1-20 | 21-442 | N/A | N/A |
| | | protist of Neotermes | | | | |
| | | koshunensis | | | | |
| SEQ ID NO: 119 | 146197067 | uncultured symbiotic | 1-22 | 23-435 | N/A | N/A |
| | | protist of | | | | |
| | | Reticulitermes | | | | |
| | | speratus | | | | |
| SEQ ID NO: 120 | 146197407 | uncultured symbiotic | 1-19 | 20-445 | N/A | N/A |
| | | protist of | | | | |
| | | Cryptocercus | | | | |
| | | punctulatus | | | | |
| SEQ ID NO: 121 | 146197157 | uncultured symbiotic | 1-20 | 21-443 | N/A | N/A |
| | | protist of | | | | |
| | | Hodotermopsis | | | | |
| | | sjoestedii | | | | |
| SEQ ID NO: 122 | 146197403 | uncultured symbiotic | 1-19 | 20-445 | N/A | N/A |
| | | protist of | | | | |
| | | Cryptocercus | | | | |
| | | punctulatus | | | | |
| SEQ ID NO: 123 | 146197081 | uncultured symbiotic | 1-22 | 23-443 | N/A | N/A |
| | | protist of | | | | |
| | | Reticulitermes | | | | |
| | | speratus | | | | |
| SEQ ID NO: 124 | 146197413 | uncultured symbiotic | 1-19 | 20-445 | N/A | N/A |
| | | protist of | | | | |
| | | Cryptocercus | | | | |
| | | punctulatus | | | | |
| SEQ ID NO: 125 | 146197309 | uncultured symbiotic | 1-20 | 21-435 | N/A | N/A |
| | | protist of | | | | |
| | | Mastotermes | | | | |
| | | darwiniensis | | | | |
| SEQ ID NO: 126 | 146197227 | uncultured symbiotic | 1-19 | 20-437 | N/A | N/A |
| | | protist of Neotermes | | | | |
| | | koshunensis | | | | |
| SEQ ID NO: 127 | 146197253 | uncultured symbiotic | 1-21 | 21-442 | N/A | N/A |
| | | protist of Neotermes | | | | |
| | | koshunensis | | | | |
| SEQ ID NO: 128 | 146197099 | uncultured symbiotic | 1-22 | 23-434 | N/A | N/A |
| | | protist of | | | | |
| | | Reticulitermes | | | | |
| | | speratus | | | | |
| SEQ ID NO: 129 | 146197409 | uncultured symbiotic | 1-19 | 20-444 | N/A | N/A |
| | | protist of | | | | |
| | | Cryptocercus | | | | |
| | | punctulatus | | | | |
| SEQ ID NO: 130 | 146197315 | uncultured symbiotic | 1-20 | 21-435 | N/A | N/A |
| | | protist of | | | | |
| | | Mastotermes | | | | |
| | | darwiniensis | | | | |
| SEQ ID NO: 131 | 146197411 | uncultured symbiotic | 1-19 | 20-445 | N/A | N/A |
| | | protist of | | | | |
| | | Cryptocercus | | | | |
| | | punctulatus | | | | |
| SEQ ID NO: 132 | 146197161 | uncultured symbiotic | 1-20 | 21-446 | N/A | N/A |
| | | protist of | | | | |
| | | Hodotermopsis | | | | |
| | | sjoestedii | | | | |
| SEQ ID NO: 133 | 146197323 | uncultured symbiotic | 1-20 | 21-435 | N/A | N/A |
| | | protist of | | | | |
| | | Mastotermes | | | | |
| | | darwiniensis | | | | |
| SEQ ID NO: 134 | 146197077 | uncultured symbiotic | 1-21 | 22-448 | N/A | N/A |
| | | protist of | | | | |
| | | Reticulitermes | | | | |
| | | speratus | | | | |
| SEQ ID NO: 135 | 146197089 | uncultured symbiotic | 1-22 | 23-433 | N/A | N/A |
| | | protist of | | | | |
| | | Reticulitermes | | | | |
| | | speratus | | | | |
| SEQ ID NO: 136 | 146197091 | uncultured symbiotic | 1-22 | 23-434 | N/A | N/A |
| | | protist of | | | | |
| | | Reticulitermes | | | | |
| | | speratus | | | | |
| SEQ ID NO: 137 | 146197097 | uncultured symbiotic | 1-22 | 23-435 | N/A | N/A |
| | | protist of | | | | |
| | | Reticulitermes | | | | |
| | | speratus | | | | |
| SEQ ID NO: 138 | 146197095 | uncultured symbiotic | 1-22 | 23-435 | N/A | N/A |
| | | protist of | | | | |
| | | Reticulitermes | | | | |
| | | speratus | | | | |
| SEQ ID NO: 139 | 146197401 | uncultured symbiotic | 1-19 | 20-445 | N/A | N/A |
| | | protist of | | | | |
| | | Cryptocercus | | | | |
| | | punctulatus | | | | |
| SEQ ID NO: 140 | 146197225 | uncultured symbiotic | 1-19 | 20-437 | N/A | N/A |
| | | protist of Neotermes | | | | |
| | | koshunensis | | | | |
| SEQ ID NO: 141 | 146197317 | uncultured symbiotic | 1-20 | 21-435 | N/A | N/A |
| | | protist of | | | | |
| | | Mastotermes | | | | |
| | | darwiniensis | | | | |
| SEQ ID NO: 142 | 146197251 | uncultured symbiotic | 1-19 | 20-437 | N/A | N/A |
| | | protist of Neotermes | | | | |
| | | koshunensis | | | | |
| SEQ ID NO: 143 | 146197319 | uncultured symbiotic | 1-20 | 21-435 | N/A | N/A |
| | | protist of | | | | |
| | | Mastotermes | | | | |
| | | darwiniensis | | | | |
| SEQ ID NO: 144 | 146197071 | unculturcd symbiotic | 1-25 | 26-435 | N/A | N/A |
| | | protist of | | | | |
| | | Reticulitermes | | | | |
| | | speratus | | | | |
| SEQ ID NO: 145 | 146197075 | uncultured symbiotic | 1-22 | 23-435 | N/A | N/A |
| | | protist of | | | | |
| | | Reticulitermes | | | | |
| | | speratus | | | | |
| SEQ ID NO: 146 | 146197159 | uncultured symbiotic | 1-23 | 24-443 | N/A | N/A |
| | | protist of | | | | |
| | | Hodotermopsis | | | | |
| | | sjoestedti | | | | |
| SEQ ID NO: 147 | 146197405 | uncultured symbiotic | 1-19 | 20-445 | N/A | N/A |
| | | protist of | | | | |
| | | Cryptocercus | | | | |
| | | punctulatus | | | | |
| SEQ ID NO: 148 | 146197327 | uncultured symbiotic | 1-20 | 21-441 | N/A | N/A |
| | | protist of | | | | |
| | | Mastotermes | | | | |
| | | darwiniensis | | | | |
| SEQ ID NO: 149 | 146197261 | uncultured symbiotic | 1-19 | 20-437 | N/A | N/A |
| | | protist of Neotermes | | | | |
| | | koshunensis | | | | |

TABLE 4

| | | | | Amino acid | Amino acid | |
|---|---|---|---|---|---|---|
| | | | | positions of | positions of | |
| Sequence | Database | | Amino acid sequence of | fragment in | active site loop | Position of catalytic |
| Identifier | Accession | Species of | fragment of catalytic domain | sequence | in sequence | residues in sequence |
| (SEQ ID NO:) | Number | Origin | including loop and catalytic residue | identifer | identifer | identifier |
| SEQ ID NO: 150 | BD29555* | Unknown | NVEGWTPSSNNANTGLGNHGACCAELDIWEANS | 210-242 | 214-226 | 234, 239 |
| SEQ ID NO: 151 | 340514556 | Trichoderma | NVEGWEPSSNNANTGIGGHGSCCSEMDIWEANS | 205-237 | 209-221 | 229, 234 |
| | | reesei | | | | |
| SEQ ID NO: 152 | 51243029 | Penicillium | NVEGWTPSANNANTGIGNHGACCAELDIWEANS | 210-242 | 214-226 | 234, 239 |
| | | occitanis | | | | |
| SEQ ID NO: 153 | 7cel (PDB) & | Trichoderma | NVEGWEPSSNNANTGIGGHGSCCSEMDIWQANS | 188-220 | 192-204 | 212, 217 |
| | | reesei | | | | |
| SEQ ID NO: 154 | 67516425 | Aspergillus | NVEGWESSDTNPNGGVGNHGSCCAEMDIWEANS | 211-243 | 215-227 | 235, 240 |
| | | nidulans FGSC | | | | |
| | | A4 | | | | |
| SEQ ID NO: 155 | 46107376 | Gibberella zeae | NSDGWQPSDSDVNGGIGNLGTCCPEMDIWEANS | 205-237 | 209-221 | 229, 234 |
| | | PH-1 | | | | |
| SEQ ID NO: 156 | 70992391 | Aspergillus | NVEGWQPSSNDANAGTGNHGSCCAEMDIWEANS | 214-246 | 218-230 | 238, 243 |
| | | fumigatus Af293 | | | | |
| SEQ ID NO: 157 | 121699984 | Aspergillus | NVEGWTPSSSDANAGNGGHGSCCAEMDIWEANS | 214-246 | 218-230 | 238, 243 |
| | | clavatus NRRL 1 | | | | |
| SEQ ID NO: 158 | 1906845 | Claviceps | NSKDWIPSKSDANAGIGSLGACCREMDIWEANN | 206-238 | 210-222 | 230, 235 |
| | | purpurca | | | | |
| SEQ ID NO: 159 | 1gpi (PDB) & | Phanerochaete | NVGNWTETG SNTGTGSYGTCCSEMDIWEANN | 185-215 | 189-199 | 207, 212 |
| | | chrysosporium | | | | |
| SEQ ID NO: 160 | 119468034 | Neosartorya | NVEGWKPSSNDKNAGVGGHGSCCPEMDIWEANS | 202-234 | 206-218 | 226, 231 |
| | | fischeri NRRL | | | | |
| | | 181 | | | | |
| SEQ ID NO: 161 | 7804883 | Leptosphaeria | NVEGWQPSKNDQNAGVGGHGSCCAEMDIWEANS | 193-225 | 197-209 | 217, 222 |
| | | maculans | | | | |
| SEQ ID NO: 162 | 85108032 | Neurospora | NVEGWTPSTNDANAGIGDHGTCCSEMDIWEANK | 205-237 | 209-221 | 229, 234 |
| | | crassa N150 | | | | |
| | | (OR74A) | | | | |
| SEQ ID NO: 163 | 169859458 | Coprinopsis | NSADWTPSETDPNAGRGRYGICCAEMDIWEANS | 207-239 | 211-223 | 231, 236 |
| | | cinerea okayama | | | | |
| SEQ ID NO: 164 | 154292161 | Botryotinia | NVEGWVPDSNSANSGTGNIGSCCSEFDVWEANS | 203-235 | 207-219 | 227, 232 |
| | | fuckeliana B05- | | | | |
| | | 10 | | | | |
| SEQ ID NO: 165 | 169615761 # | Phaeosphaeria | NADGWQASTSDPNAGVGKKGACCAEMDVWEANS | 183-215 | 187-199 | 207, 212 |
| | | nodorum SN15 | | | | |
| SEQ ID NO: 166 | 4883502 | Humicola grisea | NIEGWRPSTNDPNAGVGPMGACCAEIDVWESNA | 208-240 | 212-224 | 232, 237 |
| SEQ ID NO: 167 | 950686 | Humicola grisea | NIEGWTGSTNDPNAGAGRYGTCCSEMDIWEANN | 207-239 | 211-223 | 231, 236 |
| SEQ ID NO: 168 | 124491660 | Chaetomium | NIEGWRPSTNDANAGVGPYGACCAEIDVWESNA | 209-241 | 213-225 | 233, 238 |
| | | thermophilum | | | | |
| SEQ ID NO: 169 | 58045187 | Chaetomium | NIENWTPSTNDANAGFGRYGSCCSEMDIWEANN | 207-239 | 211-223 | 231, 236 |
| | | thermophilum | | | | |
| SEQ ID NO: 170 | 169601100 # | Phaeosphaeria | NVEGWKPSDNDANAGVGGHGSCCAEMDIWEANS | 174-206 | 178-190 | 198, 203 |
| | | nodorum SN15 | | | | |
| SEQ ID NO: 171 | 169870197 | Coprinopsis | NSVGWEPSETDSNAGRGRYGICCAEMDIWEANS | 207-239 | 211-223 | 231, 236 |
| | | cinerea okayama | | | | |
| SEQ ID NO: 172 | 3913806 | Agaricus | NSEGWEGSPNDVNAGTGNFGACCGEMDIWEANS | 203-235 | 207-219 | 227, 232 |
| | | bisporus | | | | |
| SEQ ID NO: 173 | 169611094 | Phaeosphaeria | NVEGWNPSDADPNAGSGKIGACCPEMDIWEANS | 208-240 | 212-224 | 232, 237 |
| | | nodorum SN15 | | | | |
| SEQ ID NO: 174 | 3131 | Phanerochaete | NVQGWNATS--ATTGTGSYGSCCTELDIWEANS | 204-234 | 208-218 | 226, 231 |
| | | chrysosporium | | | | |
| SEQ ID NO: 175 | 70991503 | Aspergillus | NVEGWEPSSSDKNAGVGGHGSCCPEMDIWEANS | 202-234 | 206-218 | 226, 231 |
| | | fumigatus Af293 | | | | |
| SEQ ID NO: 176 | 294196 | Phanerochaete | NVEGWNATS--ANAGTGNYGTCCTEMDIWEANN | 203-233 | 207-217 | 225, 230 |
| | | chrysosporium | | | | |
| SEQ ID NO: 177 | 18997123 | Thermoascus | NVEGWQPSANDPNAGVGNHGSSCAEMDVWEANS | 205-237 | 209-221 | 229, 234 |
| | | aurantiacus | | | | |
| SEQ ID NO: 178 | 4204214 | Humicola grisea | NIEGWRPSTNDPNAGVGPMGACCAEIDVWESNA | 208-240 | 212-224 | 232, 237 |
| | | var thermoidea | | | | |
| SEQ ID NO: 179 | 34582632 | Trichoderma | NVEGWEPSSNNANTGIGGHGSCCSEMDIWEANS | 205-237 | 209-221 | 229, 234 |
| | | viride (also | | | | |
| | | known as | | | | |
| | | Hypochrea rufa) | | | | |
| SEQ ID NO: 180 | 156712284 | Thermoascus | NVEGWQPSANDPNAGVGNHGSCCAEMDVWEANS | 205-237 | 209-221 | 229, 234 |
| | | aurantiacus | | | | |
| SEQ ID NO: 181 | 39977899 | Magnaporthe | NVEGWQPSSGDANSGVGNMGSCCAEMDIWEANS | 205-237 | 209-221 | 229, 234 |
| | | grisea (oryzae) | | | | |
| | | 70-15 | | | | |
| SEQ ID NO: 182 | 20986705 | Talaromyces | NVEGWQPSSNNANTGIGDHGSCCAEMDVWEANS | 203-235 | 207-219 | 227, 232 |
| | | emersonii | | | | |
| SEQ ID NO: 183 | 22138843 | Aspergillus | R-KGWEPSDSDKNAGVGGHGSCCPQMDIWEANS | 203-234 | 206-218 | 226, 231 |
| | | oryzae | | | | |
| SEQ ID NO: 184 | 55775695 | Penicillium | NVEGWEPSSSDVNGGTGNYGSCCAEMDIWEANS | 213-245 | 217-229 | 237, 242 |
| | | chrysogenum | | | | |
| SEQ ID NO: 185 | 171676762 | Podospora | NIEGWNPSTNDVNAGAGRYGTCCSEMDIWEANN | 207-239 | 211-223 | 231, 236 |
| | | anserina | | | | |
| SEQ ID NO: 186 | 146350520 | Pleurotus sp | NVQGWQPSPNDSNAGKGQYGSCCAEMDIWEANS | 207-239 | 211-223 | 231, 236 |
| | | Florida | | | | |
| SEQ ID NO: 187 | 37732123 | Gibberella zeae | NSDGWQPSDSDVNGGIGNLGTCCPEMDIWEANS | 205-237 | 209-221 | 229, 234 |
| SEQ ID NO: 188 | 156055188 | Sclerotinia | NNEGWVPDSNSANSGTGNIGSCCSEFDVWEANS | 203-235 | 207-219 | 227, 232 |
| | | sclerotiorum | | | | |
| | | 1980 | | | | |
| SEQ ID NO: 189 | 453224 | Phanerochaete | NVGNWTETG--SNTGTGSYGTCCSEMDIWEANN | 203-233 | 207-217 | 225, 230 |
| | | chrysosporium | | | | |
| SEQ ID NO: 190 | 50402144 | Trichoderma | NVEGWEPSSNNANTGIGGHGSCCSEMDIWEANS | 205-237 | 209-221 | 229, 234 |
| | | reesei | | | | |
| SEQ ID NO: 191 | 115397177 | Aspergillus | NVEGWEPSANDANAGTGNHGSCCAEMDIWEANS | 211-243 | 215-227 | 235, 240 |
| | | terreus NIH2624 | | | | |
| SEQ ID NO: 192 | 154312003 | Botryotinia | NSVGWTPSSNDVNAGAGQYGSCCSEMDIWEANK | 206-238 | 210-222 | 230, 235 |
| | | fuckeliana B05- | | | | |
| | | 10 | | | | |
| SEQ ID NO: 193 | 49333365 | Volvariella | NVQGWQPSPNDTNAGTGNYGACCNEMDVWEANS | 207-239 | 211-223 | 231, 236 |
| | | volvacea | | | | |
| SEQ ID NO: 194 | 729650 | Penicillium | NVDGWTPSKNDVNSGIGNHGSCCAEMDIWEANS | 211-243 | 215-227 | 235, 240 |
| | | janthinellum | | | | |
| SEQ ID NO: 195 | 146424871 | Pleurotus sp | NILDWSASATDANAGNGRYGACCAEMDIWEANS | 206-238 | 210-222 | 230, 235 |
| | | Florida | | | | |
| SEQ ID NO: 196 | 67538012 | Aspergillus | NVEGWEPSDSDANAGVGGMGTCCPEMDIWEANS | 202-234 | 206-218 | 226, 231 |
| | | nidulans FGSC | | | | |
| | | A4 | | | | |
| SEQ ID NO: 197 | 62006162 | Fusarium poae | NSDGWEPSKSDVNGGIGNLGTCCPEMDIWEANS | 205-237 | 209-221 | 229, 234 |
| SEQ ID NO: 198 | 146424873 | Pleurotus sp | NILDWSGSATDPNAGNGRYGACCAEMDIWEANS | 206-238 | 210-222 | 230, 235 |
| | | Florida | | | | |
| SEQ ID NO: 199 | 295937 | Trichoderma | NVEGWEPSSNNANTGIGGHGSCCSEMDIWEANS | 205-237 | 209-221 | 229, 234 |
| | | viride | | | | |
| SEQ ID NO: 200 | 6179889 # | Alternaria | NVEGWKPSSNDANAGVGGHGSCCAEMDIWEANS | 177-209 | 181-193 | 201, 206 |
| | | alternata | | | | |
| SEQ ID NO: 201 | 119483864 | Neosartorya | NVEGWTPSSNNENTGLGNYGSCCAELDIWESNS | 215-247 | 219-231 | 239, 244 |
| | | fischeri NRRL | | | | |
| | | 181 | | | | |
| SEQ ID NO: 202 | 85083281 | Neurospora | NIEGWTPSTNDANAGVGPYGGCCAEIDVWESNA | 207-239 | 211-223 | 231, 236 |
| | | crassa OR74A | | | | |
| SEQ ID NO: 203 | 3913803 | Cryphonectria | NVEGWTPSTNDANAGVGGLGSCCSEMDVWEANS | 206-238 | 210-222 | 230, 235 |
| | | parasitica | | | | |
| SEQ ID NO: 204 | 60729633 | Corticium rolfsii | NLLDWNATS--ANSGTGSYGSCCPEMDIWEANK | 206-236 | 210-220 | 228, 233 |
| SEQ ID NO: 205 | 39971383 | Magnaporthe | NIEGWQPSSTDSSAGIGAQGACCAEIDIWESNK | 205-237 | 209-221 | 229, 234 |
| | | grisea 70-15 | | | | |
| SEQ ID NO: 206 | 39973029 | Magnaporthe | NIEGWKPSSNDANAGVGPYGACCAEIDVWESNA | 206-238 | 210-222 | 230, 235 |
| | | grisea 70-15 | | | | |
| SEQ ID NO: 207 | 1170141 | Fusarium | NSEGWKPSDSDVNAGVGNLGTCCPEMDIWEANS | 205-237 | 209-221 | 229, 234 |
| | | oxysporum | | | | |
| SEQ ID NO: 208 | 121710012 | Aspergillus | NVEGWKPSDNDKNAGVGGYGSCCPEMDIWEANS | 202-234 | 206-218 | 226, 231 |
| | | clavatus NRRL 1 | | | | |
| SEQ ID NO: 209 | 17902580 | Penicillium | NVEGWTPSTNNSNTGIGNHGSCCAELDIWEANS | 210-242 | 214-226 | 234, 239 |
| | | funiculosum | | | | |
| SEQ ID NO: 210 | 1346226 | Humicola grisea | NIEGWTGSTNDPNAGAGRYGTCCSEMDIWEANN | 207-239 | 211-223 | 231, 236 |
| | | var thermoidea | | | | |
| SEQ ID NO: 211 | 156712282 | Chaetomium | NVGNWTPSTNDANAGFGRYGSCCSEMDVWEANN | 207-239 | 211-223 | 231, 236 |
| | | thermophilum | | | | |
| SEQ ID NO: 212 | 169768818 | Aspergillus | NVEGWVSSTNNANTGTGNHGSCCAELDIWESNS | 214-246 | 218-230 | 238, 243 |
| | | oryzae RIB40 | | | | |
| SEQ ID NO: 213 | 46241270 | Gibberella | NSDGWQPSKSDVNAGIGNMGTCCPEMDIWEANS | 205-237 | 209-221 | 229, 234 |
| | | pulicaris | | | | |
| SEQ ID NO: 214 | 49333363 | Volvariella | NVAGWNGSPNDTNAGTGNWGACCNEMDIWEANS | 205-237 | 209-221 | 229, 234 |
| | | volvacea | | | | |
| SEQ ID NO: 215 | 46395332 | Irpex lacteus | NVAGWTGSSSDPNSGTGNYGTCCSEMDIWEANS | 202-234 | 206-218 | 226, 231 |
| SEQ ID NO: 216 | 50844407 # | Chaetomium | NIENWTPSTNDANAGFGRYGSCCSEMDIWEANN | 182-214 | 186-198 | 206, 211 |
| | | thermophilum var | | | | |
| | | thermophilum | | | | |
| SEQ ID NO: 217 | 4586347 | Irpex lacteus | NIVDWTASAGDANSGTGSFGTCCQEMDIWEANS | 203-235 | 207-219 | 227, 232 |
| SEQ ID NO: 218 | 3980202 | Phanerochaete | NVGNWTETG--SNTGTGSYGTCCSEMDIWEANN | 203-233 | 207-217 | 225, 230 |
| | | chrysosporium | | | | |
| SEQ ID NO: 219 | 27125837 | Melanocarpus | NIEGWKSSTSDPNAGVGPYGSCCAEIDVWESNA | 210-242 | 214-226 | 234, 239 |
| | | albomyces | | | | |
| SEQ ID NO: 220 | 171696102 | Podospora | NVEGWGGAD--GNSGTGKYGICCAEMDIWEANS | 206-236 | 210-220 | 228, 233 |
| | | anserina | | | | |
| SEQ ID NO: 221 | 3913802 | Cochliobolus | NVEGWNPSDADPNGGAGKIGACCPEMDIWEANS | 208-240 | 212-224 | 232, 237 |
| | | carbonum | | | | |
| SEQ ID NO: 222 | 50403723 | Trichoderma | NVEGWEPSSNNANTGIGGHGSCCSEMDIWEANS | 205-237 | 209-221 | 229, 234 |
| | | viride | | | | |
| SEQ ID NO: 223 | 3913798 | Aspergillus | NIEGWEPSSTDVNAGTGNHGSCCPEMDIWEANS | 210-242 | 214-226 | 234, 239 |
| | | aculeatus | | | | |
| SEQ ID NO: 224 | 66828465 | Dictyostelium | NVDGWIPSTNNPNTGYGNLGSCCAEMDLWEANN | 206-238 | 210-222 | 230, 235 |
| | | discoideum | | | | |
| SEQ ID NO: 225 | 156060391 | Sclerotinia | NSVGWTPSSNDVNTGTGQYGSCCSEMDIWEANK | 192-224 | 196-208 | 216, 221 |
| | | sclerotiorum | | | | |
| | | 1980 | | | | |
| SEQ ID NO: 226 | 116181754 | Chaetomium | NSEGWGGED--GNSGTGKYGTCCAEMDIWEANL | 203-233 | 207-217 | 225, 230 |
| | | globosum CBS | | | | |
| | | 148-51 | | | | |
| SEQ ID NO: 227 | 145230535 | Aspergillus niger | NCDGWEPSSNNVNTGVGDHGSCCAEMDVWEANS | 209-241 | 213-225 | 233, 238 |
| SEQ ID NO: 228 | 46241266 | Nectria | NSDEWKPSDSDKNAGVGKYGTCCPEMDIWEANK | 205-237 | 209-221 | 229, 234 |
| | | haematococca | | | | |
| | | mpVI | | | | |
| SEQ ID NO: 229 | 1q9h (PDB) # | Talaromyces | NVEGWQPSSNNANTGIGDHGSCCAEMDVWEANS | 185-217 | 189-201 | 209, 214 |
| | | emersonii | | | | |
| SEQ ID NO: 230 | 157362170 | Polyporus | NVLDWAGSSNDPNAGTGHYGTCCNEMDIWEANS | 208-240 | 212-224 | 232, 237 |
| | | arcularius | | | | |
| SEQ ID NO: 231 | 7804885 | Leptosphaeria | NAEGWTKSASDPNSGVGKKGACCAQMDVWEANS | 204-236 | 208-220 | 228, 233 |
| | | maculans | | | | |
| SEQ ID NO: 232 | 121852 | Phanerochaete | NVEGWNATS--ANAGTGNYGTCCTEMDIWEANN | 203-233 | 207-217 | 225, 230 |
| | | chrysosporium | | | | |
| SEQ ID NO: 233 | 126013214 | Penicillium | NVEGWKPSANDKNAGVGPHGSCCAEMDIWEANS | 201-233 | 205-217 | 225, 230 |
| | | decumbens | | | | |
| SEQ ID NO: 234 | 156048578 | Sclerotinia | NVDGWVPSSNNPNTGVGNYGSCCAEMDIWEANS | 202-234 | 206-218 | 226, 231 |
| | | sclerotiorum | | | | |
| | | 1980 | | | | |
| SEQ ID NO: 235 | 156712278 | Acremonium | NIDGWQPSSNDANAGLGNHGSCCSEMDIWEANK | 206-238 | 210-222 | 230, 235 |
| | | thermophilum | | | | |
| SEQ ID NO: 236 | 21449327 | Aspergillus | NVEGWEPSDSDANAGVGGMGTCCPEMDIWEANS | 202-234 | 206-218 | 226, 231 |
| | | nidulans (also | | | | |
| | | known as | | | | |
| | | Emericella | | | | |
| | | nidulans) | | | | |
| SEQ ID NO: 237 | 171683762 | Podospora | NIEGWRESSNDENAGVGPYGGCCAEIDVWESNA | 211-243 | 215-227 | 235, 240 |
| | | anserine (S | | | | |
| | | mat+) | | | | |
| SEQ ID NO: 238 | 56718412 | Thermoascus | NVEGWQPSANDPNAGVGNHGSCCAEMDVWEANS | 205-237 | 209-221 | 229, 234 |
| | | aurantiacus var | | | | |
| | | levisporus | | | | |
| SEQ ID NO: 239 | 15824273 | Pseudotrichonympha | NVENWKPQTNDENAGNGRYGACCTEMDIWEANK | 200-232 | 204-216 | 224, 229 |
| | | grassii | | | | |
| SEQ ID NO: 240 | 115390801 | Aspergillus | NVEGWTPSDNDKNAGVGGHGSCCPELDIWEANS | 203-235 | 207-219 | 227, 232 |
| | | terreus NIH2624 | | | | |
| SEQ ID NO: 241 | 453223 | Phanerochaete | NVGNWTETG--SNTGTGSYGTCCSEMDIWEANN | 203-233 | 207-217 | 225, 230 |
| | | chrysosporium | | | | |
| SEQ ID NO: 242 | 3132 | Phanerochaete | NVEGWLGTT--ATTGTGFFGSCCTDIALWEAND | 202-232 | 206-216 | 224, 229 |
| | | chrysosporium | | | | |
| SEQ ID NO: 243 | 16304152 | Thermoascus | NVEGWQPSANDPNAGVGNHGSSCAEMDVWEANS | 205-237 | 209-221 | 229, 234 |
| | | aurantiacus | | | | |
| SEQ ID NO: 244 | 156712280 | Acremonium | NSASWQPSSNDQNAGVGGMGSCCAEMDIWEANS | 210-242 | 214-226 | 234, 239 |
| | | thermophilum | | | | |
| SEQ ID NO: 245 | 5231154 | Volvariella | NVQGWQPSPNDTNAGTGNYGACCNKMDVWEANS | 220-252 | 224-236 | 244, 249 |
| | | volvacea | | | | |
| SEQ ID NO: 246 | 116200349 | Chaetomium | NYDGWTPSSNDANAGVGALGGCCAEIDVWESNA | 207-239 | 211-223 | 231, 236 |
| | | globosum CBS | | | | |
| | | 148-51 | | | | |
| SEQ ID NO: 247 | 4586343 | Irpex lacteus | NVAGWAGSASDPNAGSGTLGTCCSEMDIWEANN | 202-234 | 206-218 | 226, 231 |
| SEQ ID NO: 248 | 15321718 | Lentinula edodes | NVEGWTPSSTSPNAGTGGTGICCNEMDIWEANS | 208-240 | 212-224 | 232, 237 |
| SEQ ID NO: 249 | 146424875 | Pleurotus sp | NVLDWSASATDDNAGNGRYGACCAEMDIWEANS | 206-238 | 210-222 | 230, 235 |
| | | Florida | | | | |
| SEQ ID NO: 250 | 62006158 | Fusarium | NSDGWQPSKSDVNGGIGNLGTCCPEMDIWEANS | 205-237 | 209-221 | 229, 234 |
| | | venenatum | | | | |
| SEQ ID NO: 251 | 296027 | Phanerochaete | NVEGWNATS--ANAGTGNYGTCCTEMDIWEANN | 203-233 | 207-217 | 225, 230 |
| | | chrysosporium | | | | |
| SEQ ID NO: 252 | 154449709 | Fusicoccum sp | NVQNWTASSTDKNAGTGHYGSCCNEMDIWEANS | 209-241 | 213-225 | 233, 238 |
| | | BCC4124 | | | | |
| SEQ ID NO: 253 | 169859460 | Coprinopsis | NSVGWEPSETDPNAGKGQYGICCAEMDIWEANS | 207-239 | 211-223 | 231, 236 |
| | | cinerea okayama | | | | |
| SEQ ID NO: 254 | 50400675 | Trichoderma | NVEGWEPSSNNANTGVGGHGSCCSEMDIWEANS | 201-233 | 205-217 | 225, 230 |
| | | harzianum | | | | |
| | | (anamorph of | | | | |
| | | Hypocrea lixii) | | | | |
| SEQ ID NO: 255 | 729649 | Neurospora | NVEGWTPSTNDAN-GIGDHGSCCSEMDIWEANK | 200-231 | 204-215 | 223, 228 |
| | | crassa (OR74A) | | | | |
| SEQ ID NO: 256 | 119472134 | Neosartorya | NVEGWQPSSNDANAGTGNHGSCCAEMDIWEANS | 214-246 | 218-230 | 238, 243 |
| | | fischeri NRRL | | | | |
| | | 181 | | | | |
| SEQ ID NO: 257 | 117935080 | Chaetomium | NIEGWRPSTNDANAGVGPYGACCAEIDVWESNA | 209-241 | 213-225 | 233, 238 |
| | | thermophilum | | | | |
| SEQ ID NO: 258 | 154300584 | Botryotinia | NVDGWVPSSNNANTGVGNHGSCCAEMDIWEANS | 202-234 | 206-218 | 226, 231 |
| | | fuckeliana B05- | | | | |
| | | 10 | | | | |
| SEQ ID NO: 259 | 15824271 | Pseudotrichonympha | NVENWKPQTNDENAGNGRYGACCTEMDIWEANK | 200-232 | 204-216 | 224, 229 |
| | | grassii | | | | |
| SEQ ID NO: 260 | 4586345 | Irpex lacteus | NVEGWTGSSTDSNSGTGNYGTCCSEMDIWEANS | 202-234 | 206-218 | 226, 231 |
| SEQ ID NO: 261 | 46241268 | Gibberella | NSDGWKPSDSDINAGIGNMGTCCPEMDIWEANS | 205-237 | 209-221 | 229, 234 |
| | | avenacea | | | | |
| SEQ ID NO: 262 | 6164684 | Aspergillus niger | NCDGWEPSSNNVNTGVGDHGSCCAEMDVWEANS | 209-241 | 213-225 | 233, 238 |
| SEQ ID NO: 263 | 6164682 | Aspergillus niger | NVDGWEPSSNNDNTGIGNHGSCCPEMDIWEANK | 203-235 | 207-219 | 227, 232 |
| SEQ ID NO: 264 | 33733371 | Chrysosporium | NVENWQSSTNDANAGTGKYGSCCSEMDVWEANN | 206-238 | 210-222 | 230, 235 |
| | | luckowense | | | | |
| | | U.S. Pat. No. 6,573,086-10 | | | | |
| SEQ ID NO: 265 | 29160311 | Thielavia | NVEGWESSTNDANAGSGKYGSCCTEMDVWEANN | 206-238 | 210-222 | 230, 235 |
| | | australiensis | | | | |
| SEQ ID NO: 266 | 146197087 | uncultured | NVDDWKPQDNDENSGNGKLGTCCSEMDIWEGNM | 197-229 | 201-213 | 221, 226 |
| | | symbiotic protist | | | | |
| | | of Reticulitermes, | | | | |
| | | speratus | | | | |
| SEQ ID NO: 267 | 146197237 | uncultured | NSEGWKPQSGDKNAGNGKYGSCCSEMDVWESNS | 200-232 | 204-216 | 224, 229 |
| | | symbiotic protist | | | | |
| | | of Neotermes | | | | |
| | | koshunensis | | | | |
| SEQ ID NO: 268 | 146197067 | uncultured | NVDDWKPQDNDENSGNGKLGTCCSEMDIWEGNM | 197-229 | 201-213 | 221, 226 |
| | | symbiotic protist | | | | |
| | | of Reticulitermes | | | | |
| | | speratus | | | | |
| SEQ ID NO: 269 | 146197407 | uncultured | NVLDWKPQSNDENSGNGRYGACCTEMDIWEANS | 198-230 | 202-214 | 222, 227 |
| | | symbiotic protist | | | | |
| | | of Cryptocercus | | | | |
| | | punctulatus | | | | |
| SEQ ID NO: 270 | 146197157 | uncultured | NVEGWKPSDNDENAGTGKWGACCTEMDIWEANK | 201-233 | 205-217 | 225, 230 |
| | | symbiotic protist | | | | |
| | | of Hodotermopsis | | | | |
| | | sjoestedti | | | | |
| SEQ ID NO: 271 | 146197403 | uncultured | NVLDWKPQSNDENSGNGRYGACCTEMDIWEANS | 198-230 | 202-214 | 222, 227 |
| | | symbiotic protist | | | | |
| | | of Cryptocercus | | | | |
| | | punctulatus | | | | |
| SEQ ID NO: 272 | 146197081 | uncultured | NVDDWKPQDNDENSGDGKLGTCCSEMDIWEGNA | 197-229 | 201-213 | 221, 226 |
| | | symbiotic protist | | | | |
| | | of Reticulitermes | | | | |
| | | speratus | | | | |
| SEQ ID NO: 273 | 146197413 | uncultured | NVLDWKPQSNDENSGNGRYGACCTEMDIWEANS | 198-230 | 202-214 | 222, 227 |
| | | symbiotic protist | | | | |
| | | of Cryptocercus | | | | |
| | | punctulatus | | | | |
| SEQ ID NO: 274 | 146197309 | uncultured | NSDGWKPQSNDKNSGNGKYGSCCSEMDIWEANS | 196-228 | 200-212 | 220, 225 |
| | | symbiotic protist | | | | |
| | | of Mastotermes | | | | |
| | | darwiniensis | | | | |
| SEQ ID NO: 275 | 146197227 | uncultured | NSDGWKPQKNDKNSGNGKYGSCCSEMDIWEANS | 195-227 | 199-211 | 219, 224 |
| | | symbiotic protist | | | | |
| | | of Neotermes | | | | |
| | | koshunensis | | | | |
| SEQ ID NO: 276 | 146197253 | uncultured | NSEGWKPQSGDKNAGNGKYGSCCSEMDVWESNS | 200-232 | 204-216 | 224, 229 |
| | | symbiotic protist | | | | |
| | | of Neotermes | | | | |
| | | koshunensis | | | | |
| SEQ ID NO: 277 | 146197099 | uncultured | NVLDWKPQSNDENAGTGRYGTCCTEMDIWEANS | 197-229 | 201-213 | 221, 226 |
| | | symbiotic protist | | | | |
| | | of Reticulitermes | | | | |
| | | speratus | | | | |
| SEQ ID NO: 278 | 146197409 | uncultured | NVLDWKPQSNDENSGNGRWGARCTEMDIWEANS | 198-230 | 202-214 | 222, 227 |
| | | symbiotic protist | | | | |
| | | of Cryptocercus | | | | |
| | | punctulatus | | | | |
| SEQ ID NO: 279 | 146197315 | uncultured | NSDGWKPQSNDKNSGNGKYGSCCSEMDIWEANS | 196-228 | 200-212 | 220, 225 |
| | | symbiotic protist | | | | |
| | | of Mastotermes | | | | |
| | | darwiniensis | | | | |
| SEQ ID NO: 280 | 146197411 | uncultured | NVLDWKPQSNDENSGNGRYGACCTEMDIWEANS | 198-230 | 202-214 | 222, 227 |
| | | symbiotic protist | | | | |
| | | of Cryptocercus | | | | |
| | | punctulatus | | | | |
| SEQ ID NO: 281 | 146197161 | uncultured | NVQDWKPSDNDDNAGTGHYGACCTEMDIWEANK | 201-233 | 205-217 | 225, 230 |
| | | symbiotic protist | | | | |
| | | of Hodotermopsis | | | | |
| | | sjoestedti | | | | |
| SEQ ID NO: 282 | 146197323 | uncultured | NSDGWKPQSNDKNSGNGKYGSCCSEMDIWEANS | 196-228 | 200-212 | 220, 225 |
| | | symbiotic protist | | | | |
| | | of Mastotermes | | | | |
| | | darwiniensis | | | | |
| SEQ ID NO: 283 | 146197077 | uncultured | NVLDWKPQETDENSGNGRYGTCCTEMDIWEANS | 201-233 | 205-217 | 225, 230 |
| | | symbiotic protist | | | | |
| | | of Reticulitermes | | | | |
| | | speratus | | | | |
| SEQ ID NO: 284 | 146197089 | uncultured | NVEDWKPQDNDENSGNGKLGTCCSEMDIWEGNA | 197-229 | 201-213 | 221, 226 |
| | | symbiotic protist | | | | |
| | | of Reticulitermes | | | | |
| | | speratus | | | | |
| SEQ ID NO: 285 | 146197091 | uncultured | NVLDWKPQSNDENAGTGRYGTCCTEMDIWEANS | 197-229 | 201-213 | 221, 226 |
| | | symbiotic protist | | | | |
| | | of Reticulitermes | | | | |
| | | speratus | | | | |
| SEQ ID NO: 286 | 146197097 | uncultured | NVDDWKPQDNDENSGNGKLGTCCSEMDIWEGNA | 197-229 | 201-213 | 221, 226 |
| | | symbiotic protist | | | | |
| | | of Reticulitermes | | | | |
| | | speratus | | | | |
| SEQ ID NO: 287 | 146197095 | uncultured | NVDDWKPQDNDENSGNGKLGTCCSEMDIWEGNA | 197-229 | 201-213 | 221, 226 |
| | | symbiotic protist | | | | |
| | | of Reticulitermes | | | | |
| | | speratus | | | | |
| SEQ ID NO: 288 | 146197401 | uncultured | NVLDWKPQSNDENSGNGRYGACCIEMDIWEANS | 198-230 | 202-214 | 222, 227 |
| | | symbiotic protist | | | | |
| | | of Cryptocercus | | | | |
| | | punctulatus | | | | |
| SEQ ID NO: 289 | 146197225 | uncultured | NSDGWKPQKNDKNSGNGKYGSCCSEMDIWEANS | 195-227 | 199-211 | 219, 224 |
| | | symbiotic protist | | | | |
| | | of Neotermes | | | | |
| | | koshunensis | | | | |
| SEQ ID NO: 290 | 146197317 | uncultured | NSDGWKPQSNDKNSGNGKYGSCCSEMDIWEANS | 196-228 | 200-212 | 220, 225 |
| | | symbiotic protist | | | | |
| | | of Mastotermes | | | | |
| | | darwiniensis | | | | |
| SEQ ID NO: 291 | 146197251 | uncultured | NSDGWKPQKNDKNSGNGRYGSCCSEMDVWEANS | 195-227 | 199-211 | 219, 224 |
| | | symbiotic protist | | | | |
| | | of Neotermes | | | | |
| | | koshunensis | | | | |
| SEQ ID NO: 292 | 146197319 | uncultured | NSDGWKPQSNDKNSGNGKYGSCCSEMDIWEANS | 196-228 | 200-212 | 220, 225 |
| | | symbiotic protist | | | | |
| | | of Mastotermes | | | | |
| | | darwiniensis | | | | |
| SEQ ID NO: 293 | 146197071 | uncultured | NILDWKPSSNDENAGAGRYGTCCTEMDIWEANS | 200-232 | 204-216 | 224, 229 |
| | | symbiotic protist | | | | |
| | | of Reticulitermes | | | | |
| | | speratus | | | | |
| SEQ ID NO: 294 | 146197075 | uncultured | NVDDWKPQDNDENSGNGKLGTCCSEMDIWEGNA | 197-229 | 201-213 | 221, 226 |
| | | symbiotic protist | | | | |
| | | of Reticulitermes | | | | |
| | | speratus | | | | |
| SEQ ID NO: 295 | 146197159 | uncultured | NVKDWKPQETDENAGNGHYGACCTEMDIWEANS | 197-229 | 201-213 | 221, 226 |
| | | symbiotic protist | | | | |
| | | of Hodotermopsis | | | | |
| | | sjoestedti | | | | |
| SEQ ID NO: 296 | 146197405 | uncultured | NVLDWKPQSNDENSGNGRYGACCTEMDIWEANS | 198-230 | 202-214 | 222, 227 |
| | | symbiotic protist | | | | |
| | | of Cryptocercus | | | | |
| | | punctulatus | | | | |
| SEQ ID NO: 297 | 146197327 | uncultured | NSDGWKPQDNDENSGNGKYGSCCSEMDIWEANS | 201-233 | 205-217 | 225, 230 |
| | | symbiotic protist | | | | |
| | | of Mastotermes | | | | |
| | | darwiniensis | | | | |
| SEQ ID NO: 298 | 146197261 | uncultured | NSDGWKPQKNDKNSGNGKYGSCCSEMDIWEANS | 195-227 | 199-211 | 219, 224 |
| | | symbiotic protist | | | | |
| | | of Neotermes | | | | |
| | | koshunensis | | | | |

TABLE 5

| | Tolerance to | Tolerance to |
|---|---|---|
| | 250 mg/L cellobiose | cellobiose accumulation |
| | % Activity in 4- | % Activity in |
| | MUL Assay | Bagasse Assay |
| Substitution(s) | (+/−Cellobiose)* | (+/−BG)^{¥} |
| None | 25% | 60% |
| R273K/R422K | 95% | 84% |
| R273K/Y274Q/D281K/ | 78% | ND |
| Y410H/P411G/R422K | | |

TABLE 6

| | Tolerance to | |
|---|---|---|
| | 250 mg/L cellobiose | Tolerance to |
| | % Activity in 4- | cellobiose accumulation |
| | MUL Assay | % Activity in |
| Substitution(s) | (+/−Cellobiose)* | Bagasse Assay (+/−BG)^{¥} |
| None | 23% | 74% |
| R268K/R411K | 92% | 94% |
| R268A/R411A | 92% | 95% |
| R268A/R411K | 97% | 94% |
| R268K/R411A | 97% | 102% |
| R268K | ND | 92% |
| R268A | ND | 86% |
| R411K | ND | 89% |
| R411A | ND | 94% |

TABLE 7

| SEQ ID NO. | Amino acid sequence |
|---|---|
| SEQ ID NO: 1 | MSALNSFNMY KSALILGSLL ATAGAQQIGT YTAETHPSLS WSTCKSGGSC TTNSGAITLD ANWRWVHGVN TSTNCYTGNT WNTAICDTDA SCAQDCALDG ADYSGTYGIT |
| | TSGNSLRLNF VTGSNVGSRT YLMADNTHYQ IFDLLNQEFT FTVDVSHLPC GLNGALYFVT MDADGGVSKY PNNKAGAQYG VGYCDSQCPR DLKFIAGQAN VEGWTPSSNN |
| | ANTGLGNHGA CCAELDIWEA NSISEALTPH PCDTPGLSVC TTDACGGTYS SDRYAGTCDP DGCDFNPYRL GVTDFYGSGK TVDTTKPITV VTQFVTDDGT STGTLSEIRR |
| | YYVQNGVVIP QPSSKISGVS GNVINSDFCD AEISTFGETA SFSKHGGLAK MGAGMEAGMV LVMSLWDDYS VNMLWLDSTY PTNATGTPGA ARGSCPTTSG DPKTVESQSG |
| | SSYVTFSDIR VGPFNSTFSG GSSTGGSSTT TASGTTTTKA SSTSTSSTST GTGVAAHWGQ CGGQGWTGPT TCASGTTCTV VNPYYSQCL |
| SEQ ID NO: 2 | MYRKLAVISA FLATARAQSA CTLQSETHPP LTWQKCSSGG TCTQQTGSVV IDANWRWTHA TNSSTNCYDG NTWSSTLCPD NETCAKNCCL DGAAYASTYG VTTSGNSLSI |
| | GFVTQSAQKN VGARLYLMAS DTTYQEFTLL GNEFSFDVDV SQLPCGLNGA LYFVSMDADG GVSKYPTNTA GAKYGTGYCD SQCPRDLKFI NGQANVEGWE PSSNNANTGI |
| | GGHGSCCSEM DIWEANSISE ALTPHPCTTV GQEICEGDGC GGTYSDNRYG GTCDPDGCDW NPYRLGNTSF YGPGSSFTLD TTKKLTVVTQ FETSGAINRY YVQNGVTFQQ |
| | PNAELGSYSG NELNDDYCTA EEAEFGGSSF SDKGGLTQFK KATSGGMVLV MSLWDDYYAN MLWLDSTYPT NETSSTPGAV RGSCSTSSGV PAQVESQSPN AKVTFSNIKF |
| | GPIGSTGNPS GGNPPGGNPP GTTTTRRPAT TTGSSPGPTQ SHYGQCGGIG YSGPTVCASG TTCQVLNPYY SQCL |
| SEQ ID NO: 3 | MSALNSFNMY KSALILGSLL ATAGAQQIGT YTAETHPSLS WSTCKSGGSC TTNSGAITLD ANWRWVHGVN TSTNCYTGNT WNSAICDTDA SCAQDCALDG ADYSGTYGIT |
| | TSGNSLRLNF VTGSNVGSRT YLMADNTHYQ IFDLLNQEFT FTVDVSHLPC GLNGALYFVT MDADGGVSKY PNNKAGAQYG VGYCDSQCPR DLKFIAGQAN VEGWTPSANN |
| | ANTGIGNHGA CCAELDIWEA NSISEALTPH PCDTPGLSVC TTDACGGTYS SDRYAGTCDP DGCDFNPYRL GVTDFYGSGK TVDTTKPFTV VTQFVTNDGT STGSLSEIRR |
| | YYVQNGVVIP QPSSKISGIS GNVINSDYCA AEISTFGGTA SFNKHGGLTN MAAGMEAGMV LVMSLWDDYA VNMLWLDSTY PTNATGTPGA ARGTCATTSG DPKTVESQSG |
| | SSYVTFSDIR VGPFNSTFSG GSSTGGSTTT TASRTTTTSA SSTSTSSTST GTGVAGHWGQ CGGQGWTGPT TCVSGTTCTV VNPYYSQCL |
| SEQ ID NO: 4 | ESACTLQSET HPPLTWQKCS SGGTCTQQTG SVVIDANWRW THATNSSTNC YDGNTWSSTL CPDNETCAKN CCLDGAAYAS TYGVTTSGNS LSIDFVTQSA QKNVGARLYL |
| | MASDTTYQEF TLLGNEFSFD VDVSQLPCGL NGALYFVSMD ADGGVSKYPT NTAGAKYGTG YCDSQCPRDL KFINGQANVE GWEPSSNNAN TGIGGHGSCC SEMDIWQANS |
| | ISEALTPHPC TTVGQEICEG DGCGGTYSDN RYGGTCDPDG CDWNPYRLGN TSFYGPGSSF TLDTTKKLTV VTQFETSGAI NRYYVQNGVT FQQPNAELGS YSGNELNDDY |
| | CTAEEAEFGG SSFSDKGGLT QFKKATSGGM VLVMSLWDDY YANMLWLDST YPTNETSSTP GAVRGSCSTS SGVPAQVESQ SPNAKVTFSN IKFGPIGSTG NPSG |
| SEQ ID NO: 5 | MASSFQLYKA LLFFSSLLSA VQAQKVGTQQ AEVHPGLTWQ TCTSSGSCTT VNGEVTIDAN WRWLHTVNGY TNCYTGNEWD TSICTSNEVC AEQCAVDGAN YASTYGITTS |
| | GSSLRLNFVT QSQQKNIGSR VYLMDDEDTY TMFYLLNKEF TFDVDVSELP CGLNGAVYFV SMDADGGKSR YATNEAGAKY GTGYCDSQCP RDLKFINGVA NVEGWESSDT |
| | NPNGGVGNHG SCCAEMDIWE ANSISTAFTP HPCDTPGQTL CTGDSCGGTY SNDRYGGTCD PDGCDFNSYR QGNKTFYGPG LTVDTNSPVT VVTQFLTDDN TDTGTLSEIK |
| | RFYVQNGVVI PNSESTYPAN PGNSITTEFC ESQKELFGDV DVFSAHGGMA GMGAALEQGM VLVLSLWDDN YSNMLWLDSN YPTDADPTQP GIARGTCPTD SGVPSEVEAQ |
| | YPNAYVVYSN IKFGPIGSTF GNGGGSGPTT TVTTSTATST TSSATSTATG QAQHWEQCGG NGWTGPTVCA SPWACTVVNS WYSQCL |
| SEQ ID NO: 6 | MYRAIATASA LIAAVRAQQV CSLTQESKPS LNWSKCTSSG CSNVKGSVTI DANWRWTHQV SGSTNCYTGN KWDTSVCTSG KVCAEKCCLD GADYASTYGI TSSGDQLSLS |
| | FVTKGPYSTN IGSRTYLMED ENTYQMFQLL GNEFTFDVDV SNIGCGLNGA LYFVSMDADG GKAKYPGNKA GAKYGTGYCD AQCPRDVKFI NGQANSDGWQ PSDSDVNGGI |
| | GNLGTCCPEM DIWEANSIST AYTPHPCTKL TQHSCTGDSC GGTYSNDRYG GTCDADGCDF NSYRQGNKTF YGPGSGFNVD TTKKVTVVTQ FHKGSNGRLS EITRLYVQNG |
| | KVIANSESKI AGVPGNSLTA DFCTKQKKVF NDPDDFTKKG AWSGMSDALE APMVLVMSLW HDHHSNMLWL DSTYPTDSTK LGSQRGSCST SSGVPADLEK NVPNSKVAFS |
| | NIKFGPIGST YKSDGTTPTN PTNPSEPSNT ANPNPGTVDQ WGQCGGSNYS GPTACKSGFT CKKINDFYSQ CQ |
| SEQ ID NO: 7 | MLASTFSYRM YKTALILAAL LGSGQAQQVG TSQAEVHPSM TWQSCTAGGS CTTNNGKVVI DANWRWVHKV GDYTNCYTGN TWDTTICPDD ATCASNCALE GANYESTYGV |
| | TASGNSLRLN FVTTSQQKNI GSRLYMMKDD STYEMFKLLN QEFTFDVDVS NLPCGLNGAL YFVAMDADGG MSKYPTNKAG AKYGTGYCDS QCPRDLKFIN GQANVEGWQP |
| | SSNDANAGTG NHGSCCAEMD IWEANSISTA FTPHPCDTPG QVMCTGDACG GTYSSDRYGG TCDPDGCDFN SFRQGNKTFY GPGMTVDTKS KFTVVTQFIT DDGTSSGTLK |
| | EIKRFYVQNG KVIPNSESTW TGVSGNSITT EYCTAQKSLF QDQNVFEKHG GLEGMGAALA QGMVLVMSLW DDHSANMLWL DSNYPTTASS TTPGVARGTC DISSGVPADV |
| | EANHPDAYVV YSNIKVGPIG STFNSGGSNP GGGTTTTTTT QPTTTTTTAG NPGGTGVAQH YGQCGGIGWT GPTTCASPYT CQKLNDYYSQ CL |
| SEQ ID NO: 8 | MLPSTISYRI YKNALFFAAL FGAVQAQKVG TSKAEVHPSM AWQTCAADGT CTTKNGKVVI DANWRWVHDV KGYTNCYTGN TWNAELCPDN ESCAENCALE GADYAATYGA |
| | TTSGNALSLK FVTQSQQKNI GSRLYMMKDD NTYETFKLLN QEFTFDVDVS NLPCGLNGAL YFVSMDADGG LSRYTGNEAG AKYGTGYCDS QCPRDLKFIN GLANVEGWTP |
| | SSSDANAGNG GHGSCCAEMD IWEANSISTA YTPHPCDTPG QAMCNGDSCG GTYSSDRYGG TCDPDGCDFN SYRQGNKSFY GPGMTVDTKK KMTVVTQFLT NDGTATGTLS |
| | EIKRFYVQDG KVIANSESTW PNLGGNSLTN DFCKAQKTVF GDMDTFSKHG GMEGMGAALA EGMVLVMSLW DDHNSNMLWL DSNSPTTGTS TTPGVARGSC DISSGDPKDL |
| | EANHPDASVV YSNIKVGPIG STFNSGGSNP GGSTTTTKPA TSTTTTKATT TATTNTTGPT GTGVAQPWAQ CGGIGYSGPT QCAAPYTCTK QNDYYSQCL |
| SEQ ID NO: 9 | MHPSLQTILL SALFTTAHAQ QACSSKPETH PPLSWSRCSR SGCRSVQGAV TVDANWLWTT VDGSQNCYTG NRWDTSICSS EKTCSESCCI DGADYAGTYG VTTTGDALSL |
| | KFVQQGPYSK NVGSRLYLMK DESRYEMFTL LGNEFTFDVD VSKLGCGLNG ALYFVSMDED GGMKRFPMNK AGAKFGTGYC DSQCPRDVKF INGMANSKDW IPSKSDANAG |
| | IGSLGACCRE MDIWEANNIA SAFTPHPCKN SAYHSCTGDG CGGTYSKNRY SGDCDPDGCD FNSYRLGNTT FYGPGPKFTI DTTRKISVVT QFLKGRDGSL REIKRFYVQN |
| | GKVIPNSVSR VRGVPGNSIT QGFCNAQKKM FGAHESFNAK GGMKGMSAAV SKPMVLVMSL WDDHNSNMLW LDSTYPTNSR QRGSKRGSCP ASSGRPTDVE SSAPDSTVVF |
| | SNIKFGPIGS TFSRGK |
| SEQ ID NO: 10 | EQAGTNTAEN HPQLQSQQCT TSGGCKPLST KVVLDSNWRW VHSTSGYTNC YTGNEWDTSL CPDGKTCAAN CALDGADYSG TYGITSTGTA LTLKFVTGSN VGSRVYLMAD |
| | DTHYQLLKLL NQEFTFDVDM SNLPCGLNGA LYLSAMDADG GMSKYPGNKA GAKYGTGYCD SQCPKDIKFI NGEANVGNWT ETGSNTGTGS YGTCCSEMDI WEANNDAAAF |
| | TPHPCTTTGQ TRCSGDDCAR NTGLCDGDGC DFNSFRMGDK TFLGKGMTVD TSKPFTVVTQ FLTNDNTSTG TLSEIRRIYI QNGKVIQNSV ANIPGVDPVN SITDNFCAQQ |
| | KTAFGDTNWF AQKGGLKQMG EALGNGMVLA LSIWDDHAAN MLWLDSDYPT DKDPSAPGVA RGTCATTSGV PSDVESQVPN SQVVFSNIKF GDIGSTFSGT S |
| SEQ ID NO: 11 | MHQRALLFSA LAVAANAQQV GTQKPETHPP LTWQKCTAAG SCSQQSGSVV IDANWRWLHS TKDTTNCYTG NTWNTELCPD NESCAQNCAV DGADYAGTYG VTTSGSELKL |
| | SFVTGANVGS RLYLMQDDET YQHFNLLNNE FTFDVDVSNL PCGLNGALYF VAMDADGGMS KYPSNKAGAK YGTGYCDSQC PRDLKFINGM ANVEGWKPSS NDKNAGVGGH |
| | GSCCPEMDIW EANSISTAVT PHPCDDVSQT MCSGDACGGT YSATRYAGTC DPDGCDFNPF RMGNESFYGP GKIVDTKSEM TVVTQFITAD GTDTGALSEI KRLYVQNGKV |
| | IANSVSNVAD VSGNSISSDF CTAQKKAFGD EDIFAKHGGL SGMGKALSEM VLIMSIWDDH HSSMMWLDST YPTDADPSKP GVARGTCEHG AGDPEKVESQ HPDASVTFSN |
| | IKFGPIGSTY KA |
| SEQ ID NO: 12 | MYRSLIFATS LLSLAKGQLV GNLYCKGSCT AKNGKVVIDA NWRWLHVKGG YTNCYTGNEW NATACPDNKS CATNCAIDGA DYRRLRHYCE RQLLGTEVHH QGLYSTNIGS |
| | RTYLMQDDST YQLFKFTGSQ EFTFDVDLSN LPCGLNGALY FVSMDADGGL KKYPTNKAGA KYGTGYCDAQ CPRDLKFING EGNVEGWQPS KNDQNAGVGG HGSCCAEMDI |
| | WEANSVSTAV TPHSCSTIEQ SRCDGDGCGG TYSADRYAGV CDPDGCDFNS YRMGVKDFYG KGKTVDTSKK FTVVTQFIGS GDAMEIKRFY VQNGKTIPQP DSTIPGVTGN |
| | SITTFFCDAQ KKAFGDKYTF KDKGGMANMP STCNGMVLVM SLWDDHYSNM LWLDSTYPTD KNPDTDAGSG RGECAITSGV PADVESQHPD ASVIYSNIKF GPINTTFG |
| SEQ ID NO: 13 | MLAKFAALAA LVASANAQAV CSLTAETHPS LNWSKCTSSG CTNVAGSITV DANWRWTHIT SGSTNCYSGN EWDTSLCSTN TDCATKCCVD GAEYSSTYGI QTSGNSLSLQ |
| | FVTKGSYSTN IGSRTYLMNG ADAYQGFELL GNEFTFDVDV SGTGCGLNGA LYFVSMDLDG GKAKYTNNKA GAKYGTGYCD AQCPRDLKYI NGIANVEGWT PSTNDANAGI |
| | GDHGTCCSEM DIWEANKVST AFTPHPCTTI EQHMCEGDSC GGTYSDDRYG GTCDADGCDF NSYRMGNTTF YGEGKTVDTS SKFTVVTQFI KDSAGDLAEI KRFYVQNGKV |
| | IENSQSNVDG VSGNSITQSF CNAQKTAFGD IDDFNKKGGL KQMGKALAKP MVLVMSIWDD HAANMLWLDS TYPVEGGPGA YRGECPTTSG VPAEVEANAP NSKVIFSNIK |
| | FGPIGSTFSG GSSGTPPSNP SSSVKPVTST AKPSSTSTAS NPSGTGAAHW AQCGGIGFSG PTTCQSPYTC QKINDYYSQC V |
| SEQ ID NO: 14 | MFKKVALTAL CFLAVAQAQQ VGREVAENHP RLPWQRCTRN GGCQTVSNGQ VVLDANWRWL HVTDGYTNCY TGNSWNSTVC SDPTTCAQRC ALEGANYQQT YGITTNGDAL |
| | TIKFLTRSQQ TNVGARVYLM ENENRYQMFN LLNKEFTFDV DVSKVPCGIN GALYFIQMDA DGGMSKQPNN RAGAKYGTGY CDSQCPRDIK FIDGVANSAD WTPSETDPNA |
| | GRGRYGICCA EMDIWEANSI SNAYTPHPCR TQNDGGYQRC EGRDCNQPRY EGLCDPDGCD YNPFRMGNKD FYGPGKTVDT NRKMTVVTQF ITHDNTDTGT LVDIRRLYVQ |
| | DGRVIANPPT NFPGLMPAHD SITEQFCTDQ KNLFGDYSSF ARDGGLAHMG RSLAKGHVLA LSIWNDHGAH MLWLDSNYPT DADPNKPGIA RGTCPTTGGT PRETEQNHPD |
| | AQVIFSNIKF GDIGSTFSGY |
| SEQ ID NO: 15 | MYSAAVLATF SFLLGAGAQQ VGTSTAETHP ALTVQKCAAG GTCTDESDSI VLDANWRWLH STSGSTNCYT GNTWDTTLCP DAATCTTNCA LDGADYEGTY GITTSGDSLK |
| | LSFVTGSNVG SRTYLMDSET TYKEFALLGN EFTFTVDVSK LPCGLNGALY FVPMDADGGM SKYPTNKAGA KYGTGYCDAQ CPQDMKFVNG TANVEGWVPD SNSANSGTGN |
| | IGSCCSEFDV WEANSMSQAL TPHVCTVDSQ TACTGDDCAS NTGVCDGDGC DFNPYRMGNT TFYGSGMTID TSKPFSVVTQ FITDDGTETG TLTEIKRFYV QDDVVYEQPS |
| | SDISGVSGNS ITDDFCAAQK TAFGDTDYFT QNGGMAAMGK KMADGMVLVL SIWDDYNVNM LWLDSDYPTT KDASTPGVSR GSCATDSGVP ATVEAASGSA YVTFSSIKYG |
| | PIGSTFNAPA DSSSSVSASS SPAPIASSSS SASIAPVSSV VAAIVSSSAQ AISSAAPVVS SSAQAISSAA PVVSSVVSSA APVATSSTKS KCSKVSSTLK TSVAAPATSA |
| | TSAAVVATSS AASSTGSVPL YGNCTGGKTC SEGTCVVQND YYSQCVASS |
| SEQ ID NO: 16 | MTWQRCTGTG GSSCTNVNGE IVIDANWRWI HATGGYTNCF DGNEWNKTAC PSNAACTKNC AIEGSDYRGT YGITTSGNSL TLKFITKGQY STNVGSRTYL MKDTNNYEMF |
| | NLIGNEFTFD VDLSQLPCGL NGALYFVSMP EKGQGTPGAK YGTGKLSQCS VHISKTLTDA CARDLKFVGG EANADGWQAS TSDPNAGVGK KGACCAEMDV WEANSMSTAL |
| | TPHSCQPEGY AVCEESNCGG TYSLDRYAGT CDANGCDFNP YRVGNKDFYG KGKTVDTSKK MTVVTQFLGT GSDLTELKRF YVQDGKVISN PEPTIPGMTG NSITQKWCDT |
| | QKEVFKEEVY PFNQWGGMAS MGKGMAQGMV LVMSLWDDHY SNMLWLDSTY PTDRDPESPG AARGECAITS GAPAEVEANN PDASVMFSNI KFGPIGSTFQ QPA |
| SEQ ID NO: 17 | MQIKSYIQYL AAALPLLSSV AAQQAGTITA ENHPRMTWKR CSGPGNCQTV QGEVVIDANW RWLHNNGQNC YEGNKWTSQC SSATDCAQRC ALDGANYQST YGASTSGDSL |
| | TLKFVTKHEY GTNIGSRFYL MANQNKYQMF TLMNNEFAFD VDLSKVECGI NSALYFVAME EDGGMASYPS NRAGAKYGTG YCDAQCARDL KFIGGKANIE GWRPSTNDPN |
| | AGVGPMGACC AEIDVWESNA YAYAFTPHAC GSKNRYHICE TNNCGGTYSD DRFAGYCDAN GCDYNPYRMG NKDFYGKGKT VDTNRKFTVV SRFERNRLSQ FFVQDGRKIE |
| | VPPPTWPGLP NSADITPELC DAQFRVFDDR NRFAETGGFD ALNEALTIPM VLVMSIWDDH HSNMLWLDSS YPPEKAGLPG GDRGPCPTTS GVPAEVEAQY PNAQVVWSNI |
| | RFGPIGSTVN V |
| SEQ ID NO: 18 | MRTAKFATLA ALVASAAAQQ ACSLTTERHP SLSWKKCTAG GQCQTVQASI TLDSNWRWTH QVSGSTNCYT GNKWDTSICT DAKSCAQNCC VDGADYTSTY GITTNGDSLS |
| | LKFVTKGQYS TNVGSRTYLM DGEDKYQTFE LLGNEFTFDV DVSNIGCGLN GALYFVSMDA DGGLSRYPGN KAGAKYGTGY CDAQCPRDIK FINGEANIEG WTGSTNDPNA |
| | GAGRYGTCCS EMDIWEANNM ATAFTPHPCT IIGQSRCEGD SCGGTYSNER YAGVCDPDGC DFNSYRQGNK TFYGKGMTVD TTKKITVVTQ FLKDANGDLG EIKRFYVQDG |
| | KIIPNSESTI PGVEGNSITQ DWCDRQKVAF GDIDDFNRKG GMKQMGKALA GPMVLVMSIW DDHASNMLWL DSTFPVDAAG KPGAERGACP TTSGVPAEVE AEAPNSNVVF |
| | SNIRFGPIGS TVAGLPGAGN GGNNGGNPPP PTTTTSSAPA TTTTASAGPK AGRWQQCGGI GFTGPTQCEE PYTCTKLNDW YSQCL |
| SEQ ID NO: 19 | MQIKQYLQYL AAALPLVNMA AAQRAGTQQT ETHPRLSWKR CSSGGNCQTV NAEIVIDANW RWLHDSNYQN CYDGNRWTSA CSSATDCAQK CYLEGANYGS TYGVSTSGDA |
| | LTLKFVTKHE YGTNIGSRVY LMNGSDKYQM FTLMNNEFAF DVDLSKVECG LNSALYFVAM EEDGGMRSYS SNKAGAKYGT GYCDAQCARD LKFVGGKANI EGWRPSTNDA |
| | NAGVGPYGAC CAEIDVWESN AYAFAFTPHG CLNNNYHVCE TSNCGGTYSE DRFGGLCDAN GCDYNPYRMG NKDFYGKGKT VDTSRKFTVV TRFEENKLTQ FFIQDGRKID |
| | IPPPTWPGLP NSSAITPELC TNLSKVFDDR DRYEETGGFR TINEALRIPM VLVMSIWDGH YANMLWLDSV YPPEKAGQPG AERGPCAPTS GVPAEVEAQF PNAQVIWSNI |
| | RFGPIGSTYQ V |
| SEQ ID NO: 20 | MMYKKFAALA ALVAGAAAQQ ACSLTTETHP RLTWKRCTSG GNCSTVNGAV TIDANWRWTH TVSGSTNCYT GNEWDTSICS DGKSCAQTCC VDGADYSSTY GITTSGDSLN |
| | LKFVTKHQHG TNVGSRVYLM ENDTKYQMFE LLGNEFTFDV DVSNLGCGLN GALYFVSMDA DGGMSKYSGN KAGAKYGTGY CDAQCPRDLK FINGEANIEN WTPSTNDANA |
| | GFGRYGSCCS EMDIWDANNM ATAFTPHPCT IIGQSRCEGN SCGGTYSSER YAGVCDPDGC DFNAYRQGDK TFYGKGMTVD TTKKMTVVTQ FHKNSAGVLS EIKRFYVQDG |
| | KIIANAESKI PGNPGNSITQ EWCDAQKVAF GDIDDFNRKG GMAQMSKALE GPMVLVMSVW DDHYANMLWL DSTYPIDKAG TPGAERGACP TTSGVPAEIE AQVPNSNVIF |
| | SNIRFGPIGS TVPGLDGSTP SNPTATVAPP TSTTTSVRSS TTQISTPTSQ PGGCTTQKWG QCGGIGYTGC TNCVAGTTCT ELNPWYSQCL |
| SEQ ID NO: 21 | MYRNFLYAAS LLSVARSQLV GTQTTETHPG MTWQSCTAKG SCTTCSDNKA CASNCAVDGA DYKGTYGITA SGNSLQLKFI TKGSYSTNIG SRTYLMASDT AYQMFKFDGN |
| | KEFTFDVDLS GLPCGFNGAL YFVSMDEDGG LKKYSGNKAG AKYGTGYCDA QCPRDLKFIN GEGNVEGWKP SDNDANAGVG GHGSCCAEMD IWEANSISTA VTPHACSTIE |
| | QTRCDGDGCG GTYSADRYAG VCDPDGCDFN AYRMGVKNFY GKGMTVDTSK KFTVVTQFIG TGDAMEIKRF YVQGGKTIEQ PASTIPGVEG NSITTKFCDQ QKQVFGDRYT |
| | YKEKGGTANM AKALAQGMVL VMSLWDDHYS NMLWLDSTYP TDKNPDTDLG SGRGSCDVKS GAPADVESKS PDATVIYSNI KFGPLNSTY |
| SEQ ID NO: 22 | MLGKIAIASL SFLAIAKGQQ VGREVAENHP RLPWQRCTRN GGCQTVSNGQ VVLDANWRWL HVTDGYTNCY TGNSWNSSVC SDGTTCAQRC ALEGANYQQT YGITTSGNSL |
| | TMKFLTRSQG TNVGGRVYLM ENENRYQMFN LLNKEFTFDV DVSKVPCGIN GALYFIQMDA DGGMSSQPNN RAGAKYGTGY CDSQCPRDIK FIDGVANSVG WEPSETDSNA |
| | GRGRYGICCA EMDIWEANSI SNAYTPHPCR TQNDGGYQRC EGRDCNQPRY EGLCDPDGCD YNPFRMGNKD FYGPGKTIDT NRKMTVVTQF ITHDNTDTGT LVDIRRLYVQ |
| | DGRVIANPPT NFPGLMPAHD SITEQFCTDQ KNLFGDYSSF ARDGGLAHMG RSLAKGHVLA LSIWNDHGAH MLWLDSNYPT DADPNKPGIA RGTCPTTGGT PRETEQNHPD |
| | AQVIFSNIKF GDIGSTFSGY |
| SEQ ID NO: 23 | MFPRSILLAL SLTAVALGQQ VGTNMAENHP SLTWQRCTSS GCQNVNGKVT LDANWRWTHR INDFTNCYTG NEWDTSICPD GVTCAENCAL DGADYAGTYG VTSSGTALTL |
| | KFVTESQQKN IGSRLYLMAD DSNYEIFNLL NKEFTFDVDV SKLPCGLNGA LYFSEMAADG GMSSTNTAGA KYGTGYCDSQ CPRDIKFIDG EANSEGWEGS PNDVNAGTGN |
| | FGACCGEMDI WEANSISSAY TPHPCREPGL QRCEGNTCSV NDRYATECDP DGCDFNSFRM GDKSFYGPGM TVDTNQPITV VTQFITDNGS DNGNLQEIRR IYVQNGQVIQ |
| | NSNVNIPGID SGNSISAEFC DQAKEAFGDE RSFQDRGGLS GMGSALDRGM VLVLSIWDDH AVNMLWLDSD YPLDASPSQP GISRGTCSRD SGKPEDVEAN AGGVQVVYSN |
| | IKFGDINSTF NNNGGGGGNP SPTTTRPNSP AQTMWGQCGG QGWTGPTACQ SPSTCHVIND FYSQCF |
| SEQ ID NO: 24 | MYRNLALASL SLFGAARAQQ AGTVTTETHP SLSWKTCTGT GGTSCTTKAG KITLDANWRW THVTTGYTNC YDGNSWNTTA CPDGATCTKN CAVDGADYSG TYGITTSSNS |
| | LSIKFVTKGS NSANIGSRTY LMESDTKYQM FNLIGQEFTF DVDVSKLPCG LNGALYFVEM AADGGIGKGN NKAGAKYGTG YCDSQCPHDI KFINGKANVE GWNPSDADPN |
| | AGSGKIGACC PEMDIWEANS ISTAYTPHPC KGTGLQECTD DVSCGDGSNR YSGLCDKDGC DFNSYRMGVK DFYGPGATLD TTKKMTVVTQ FLGSGSTLSE IKRFYVQNGK |
| | VFKNSDSAIE GVTGNSITES FCAAQKTAFG DTNSFKTLGG LNEMGASLAR GHVLVMSLWD DHAVNMLWLD STYPTNSTKL GAQRGTCAID SGKPEDVEKN HPDATVVFSD |
| | IKFGPIGSTF QQPS |
| SEQ ID NO: 25 | MVDIQIATFL LLGVVGVAAQ QVGTYIPENH PLLATQSCTA SGGCTTSSSK IVLDANRRWI HSTLGTTSCL TANGWDPTLC PDGITCANYC ALDGVSYSST YGITTSGSAL |
| | RLQFVTGTNI GSRVFLMADD THYRTFQLLN QELAFDVDVS KLPCGLNGAL YFVAMDADGG KSKYPGNRAG AKYGTGYCDS QCPRDVQFIN GQANVQGWNA TSATTGTGSY |
| | GSCCTELDIW EANSNAAALT PHTCTNNAQT RCSGSNCTSN TGFCDADGCD FNSFRLGNTT FLGAGMSVDT TKTFTVVTQF ITSDNTSTGN LTEIRRFYVQ NGNVIPNSVV |
| | NVTGIGAVNS ITDPFCSQQK KAFIETNYFA QHGGLAQLGQ ALRTGMVLAF SISDDPANHM LWLDSNFPPS ANPAVPGVAR GMCSITSGNP ADVGILNPSP YVSFLNIKFG |
| | SIGTTFRPA |
| SEQ ID NO: 26 | MHQRALLFSA LAVAANAQQV GTQTPETHPP LTWQKCTAAG SCSQQSGSVV IDANWRWLHS TKDTTNCYTG NTWNTELCPD NESCAQNCAL DGADYAGTYG VTTSGSELKL |
| | SFVTGANVGS RLYLMQDDET YQHFNLLNHE FTFDVDVSNL PCGLNGALYF VAMDADGGMS KYPSNKAGAK YGTGYCDSQC PRDLKFINGM ANVEGWEPSS SDKNAGVGGH |
| | GSCCPEMDIW EANSISTAVT PHPCDDVSQT MCSGDACGGT YSESRYAGTC DPDGCDFNPF RMGNESFYGP GKIVDTKSKM TVVTQFITAD GTDSGALSEI KRLYVQNGKV |
| | IANSVSNVAG VSGNSITSDF CTAQKKAFGD EDIFAKHGGL SGMGKALSEM VLIMSIWDDH HSSMMWLDST YPTDADPSKP GVARGTCEHG AGDPENVESQ HPDASVTFSN |
| | IKFGPIGSTY EG |
| SEQ ID NO: 27 | MFRTATLLAF TMAAMVFGQQ VGTNTAENHR TLTSQKCTKS GGCSNLNTKI VLDANWRWLH STSGYTNCYT GNQWDATLCP DGKTCAANCA LDGADYTGTY GITASGSSLK |
| | LQFVTGSNVG SRVYLMADDT HYQMFQLLNQ EFTFDVDMSN LPCGLNGALY LSAMDADGGM AKYPTNKAGA KYGTGYCDSQ CPRDIKFING EANVEGWNAT SANAGTGNYG |
| | TCCTEMDIWE ANNDAAAYTP HPCTTNAQTR CSGSDCTRDT GLCDADGCDF NSFRMGDQTF LGKGLTVDTS KPFTVVTQFI TNDGTSAGTL TEIRRLYVQN GKVIQNSSVK |
| | IPGIDPVNSI TDNFCSQQKT AFGDTNYFAQ HGGLKQVGEA LRTGMVLALS IWDDYAANML WLDSNYPTNK DPSTPGVARG TCATTSGVPA QIEAQSPNAY VVFSNIKFGD |
| | LNTTYTGTVS SSSVSSSHSS TSTSSSHSSS STPPTQPTGV TVPQWGQCGG IGYTGSTTCA SPYTCHVLNP YYSQCY |
| SEQ ID NO: 28 | MYQRALLFSF FLAAARAHEA GTVTAENHPS LTWQQCSSGG SCTTQNGKVV IDANWRWVHT TSGYTNCYTG NTWDTSICPD DVTCAQNCAL DGADYSGTYG VTTSGNALRL |
| | NFVTQSSGKN IGSRLYLLQD DTTYQIFKLL GQEFTFDVDV SNLPCGLNGA LYFVAMDADG NLSKYPGNKA GAKYGTGYCD SQCPRDLKFI NGQANVEGWQ PSANDPNAGV |
| | GNHGSSCAEM DVWEANSIST AVTPHPCDTP GQTMCQGDDC GGTYSSTRYA GTCDPDGCDF NPYQPGNHSF YGPGKIVDTS SKFTVVTQFI TDDGTPSGTL TEIKRFYVQN |
| | GKVIPQSEST ISGVTGNSIT TEYCTAQKAA FGDNTGFFTH GGLQKISQAL AQGMVLVMSL WDDHAANMLW LDSTYPTDAD PDTPGVARGT CPTTSGVPAD VESQNPNSYV |
| | IYSNIKVGPI NSTFTAN |
| SEQ ID NO: 29 | MQIKSYIQYL AAALPLLSSV AAQQAGTITA ENHPRMTWKR CSGPGNCQTV QGEVVIDANW RWLHNNGQNC YEGNKWTSQC SSATDCAQRC ALDGANYQST YGASTSGDSL |
| | TLKFVTKHEY GTNIGSRFYL MANQNKYQMF TLMNNEFAFD VDLSKVECGI NSALYFVAME EDGGMASYPS NRAGAKYGTG YCDAQCARDL KFIGGKANIE GWRPSTNDPN |
| | AGVGPMGACC AEIDVWESNA YAYAFTPHAC GSKNRYHICE TNNCGGTYSD DRFAGYCDAN GCDYNPYRMG NKDFYGKGKT VDTNRKFTVV SRFERNRLSQ FFVQDGRKIE |
| | VPPPTWPGLP NSADITPELC DAQFRVFDDR NRFAETGGFD ALNEALTIPM VLVMSIWDDH HSNMLWLDSS YPPEKAGLPG GDRGPCPTTS GVPAEVEAQY PDAQVVWSNI |
| | RFGPIGSTVN V |
| SEQ ID NO: 30 | MYRKLAVISA FLATARAQSA CTLQSETHPP LTWQKCSSGG TCTQQTGSVV IDANWRWTHA TNSSTNCYDG NTWSSTLCPD NETCAKNCCL DGAAYASTYG VTTSGNSLSI |
| | GFVTQSAQKN VGARLYLMAS DTTYQEFTLL GNEFSFDVDV SQLPCGLNGA LYFVSMDADG GVSKYPTNTA GAKYGTGYCD SQCPRDLKFI NGQANVEGWE PSSNNANTGI |
| | GGHGSCCSEM DIWEANSISE ALTPHPCTTV GQEICEGDGC GGTYSDNRYG GTCDPDGCDW DPYRLGNTSF YGPGSSFTLD TTKKLTVVTQ FETSGAINRY YVQNGVTFQQ |
| | PNAELGSYSG NGLNDDYCTA EEAEFGGSSF SDKGGLTQFK KATSGGMVLV MSLWDDYYAN MLWLDSTYPT NETSSTPGAV RGSCSTSSGV PAQVESQSPN AKVTFSNIKF |
| | GPIGSTGDPS GGNPPGGNPP GTTTTRRPAT TTGSSPGPTQ SHYGQCGGIG YSGPTVCASG TTCQVLNPYY SQCL |
| SEQ ID NO: 31 | MYQRALLFSF FLAAARAQQA GTVTAENHPS LTWQQCSSGG SCTTQNGKVV IDANWRWVHT TSGYTNCYTG NTWDTSICPD DVTCAQNCAL DGADYSGTYG VTTSGNALRL |
| | NFVTQSSGKN IGSRLYLLQD DTTYQIFKLL GQEFTFDVDV SNLPCGLNGA LYFVAMDADG GLSKYPGNKA GAKYGTGYCD SQCPRDLKFI NGQANVEGWQ PSANDPNAGV |
| | GNHGSCCAEM DVWEANSIST AVTPHPCDTP GQTMCQGDDC GGTYSSTRYA GTCDPDGCDF NPYRQGNHSF YGPGQIVDTS SKFTVVTQFI TDDGTPSGTL TEIKRFYVQN |
| | GKVIPQSEST ISGVTGNSIT TEYCTAQKAA FGDNTGFFTH GGLQKISQAL AQGMVLVMSL WDDHAANMLW LDSTYPTDAD PDTPGVARGT CPTTSGVPAD VESQYPNSYV |
| | IYSNIKVGPI NSTFTAN |
| SEQ ID NO: 32 | MIRKITTLAA LVGVVRGQAA CSLTAETHPS LTWQKCSSGG SCTNVAGSVT IDANWRWTHT TSGYTNCYTG NKWDTSICST NADCASKCCV DGANYQQTYG ASTSGNALSL |
| | QYVTQSSGKN VGSRLYLLES ENKYQMFNLL GNEFTFDVDA SKLGCGLNGA VYFVSMDADG GQSKYSGNKA GAKYGTGYCD SQCPRDLKYI NGAANVEGWQ PSSGDANSGV |
| | GNMGSCCAEM DIWEANSIST AYTPHPCSNN AQHSCKGDDC GGTYSSVRYA GDCDPDGCDF NSYRQGNRTF YGPGSNFNVD SSKKVTVVTQ FISSGGQLTD IKRFYVQNGK |
| | VIPNSQSTIT GVTGNSVTQD YCDKQKTAFG DQNVFNQRGG LRQMGDALAK GMVLVMSVWD DHHSQMLWLD STYPTTSTAP GAARGSCSTS SGKPSDVQSQ TPGATVVYSN |
| | IKFGPIGSTF KSS |
| SEQ ID NO: 33 | MLRRALLLSS SAILAVKAQQ AGTATAENHP PLTWQECTAP GSCTTQNGAV VLDANWRWVH DVNGYTNCYT GNTWDPTYCP DDETCAQNCA LDGADYEGTY GVTSSGSSLK |
| | LNFVTGSNVG SRLYLLQDDS TYQIFKLLNR EFSFDVDVSN LPCGLNGALY FVAMDADGGV SKYPNNKAGA KYGTGYCDSQ CPRDLKFIDG EANVEGWQPS SNNANTGIGD |
| | HGSCCAEMDV WEANSISNAV TPHPCDTPGQ TMCSGDDCGG TYSNDRYAGT CDPDGCDFNP YRMGNTSFYG PGKIIDTTKP FTVVTQFLTD DGTDTGTLSE IKRFYIQNSN |
| | VIPQPNSDIS GVTGNSITTE FCTAQKQAFG DTDDFSQHGG LAKMGAAMQQ GMVLVMSLWD DYAAQMLWLD SDYPTDADPT TPGIARGTCP TDSGVPSDVE SQSPNSYVTY |
| | SNIKFGPINS TFTAS |
| SEQ ID NO: 34 | MHQRALLFSA FWTAVQAQQA GTLTAETHPS LTWQKCAAGG TCTEQKGSVV LDSNWRWLHS VDGSTNCYTG NTWDATLCPD NESCASNCAL DGADYEGTYG VTTSGDALTL |
| | QFVTGANIGS RLYLMADDDE SYQTFNLLNN EFTFDVDASK LPCGLNGAVY FVSMDADGGV AKYSTNKAGA KYGTGYCDSQ CPRDLKFING QVRKGWEPSD SDKNAGVGGH |
| | GSCCPQMDIW EANSISTAYT PHPCDDTAQT MCEGDTCGGT YSSERYAGTC DPDGCDFNAY RMGNESFYGP SKLVDSSSPV TVVTQFITAD GTDSGALSEI KRFYVQGGKV |
| | IANAASNVDG VTGNSITADF CTAQKKAFGD DDIFAQHGGL QGMGNALSSM VLTLSIWDDH HSSMMWLDSS YPEDADATAP GVARGTCEPH AGDPEKVESQ SGSATVTYSN |
| | IKYGPIGSTF DAPA |
| SEQ ID NO: 35 | MASTLSFKIY KNALLLAAFL GAAQAQQVGT STAEVHPSLT WQKCTAGGSC TSQSGKVVID SNWRWVHNTG GYTNCYTGND WDRTLCPDDV TCATNCALDG ADYKGTYGVT |
| | ASGSSLRLNF VTQASQKNIG SRLYLMADDS KYEMFQLLNQ EFTFDVDVSN LPCGLNGALY FVAMDEDGGM ARYPTNKAGA KYGTGYCDAQ CPRDLKFING QANVEGWEPS |
| | SSDVNGGTGN YGSCCAEMDI WEANSISTAF TPHPCDDPAQ TRCTGDSCGG TYSSDRYGGT CDPDGCDFNP YRMGNQSFYG PSKIVDTESP FTVVTQFITN DGTSTGTLSE |
| | IKRFYVQNGK VIPQSVSTIS AVTGNSITDS FCSAQKTAFK DTDVFAKHGG MAGMGAGLAE GMVLVMSLWD DHAANMLWLD STYPTSASST TPGAARGSCD ISSGEPSDVE |
| | ANHSNAYVVY SNIKVGPLGS TFGSTDSGSG TTTTKVTTTT ATKTTTTTGP STTGAAHYAQ CGGQNWTGPT TCASPYTCQR QGDYYSQCL |
| SEQ ID NO: 36 | MVSAKFAALA ALVASASAQQ VCSLTPESHP PLTWQRCSAG GSCTNVAGSV TLDSNWRWTH TLQGSTNCYS GNEWDTSICT TGTKCAQNCC VEGAEYAATY GITTSGNQLN |
| | LKFVTEGKYS TNVGSRTYLM ENATKYQGFN LLGNEFTFDV DVSNIGCGLN GALYFVSMDL DGGLAKYSGN KAGAKYGTGY CDAQCPRDIK FINGEANIEG WNPSTNDVNA |
| | GAGRYGTCCS EMDIWEANNM ATAYTPHSCT ILDQSRCEGE SCGGTYSSDR YGGVCDPDGC DFNSYRMGNK EFYGKGKTVD TTKKMTVVTQ FLKNAAGELS EIKRFYVQNG |
| | VVIPNSVSSI PGVPNQNSIT QDWCDAQKIA FGDPDDNTAK GGLRQMGLAL DKPMVLVMSI WNDHAAHMLW LDSTYPVDAA GRPGAERGAC PTTSGVPSEV EAEAPNSNVA |
| | FSNIKFGPIG STFNSGSTNP NPISSSTATT PTSTRVSSTS TAAQTPTSAP GGTVPRWGQC GGQGYTGPTQ CVAPYTCVVS NQWYSQCL |
| SEQ ID NO: 37 | MFPYIALVSF SFLSVVLAQQ VGTLTAETHP QLTVQQCTRG GSCTTQQRSV VLDGNWRWLH STSGSNNCYT GNTWDTSLCP DAATCSRNCA LDGADYSGTY GITSSGNALT |
| | LKFVTHGPYS TNIGSRVYLL ADDSHYQMFN LKNKEFTFDV DVSQLPCGLN GALYFSQMDA DGGTGRFPNN KAGAKYGTGY CDSQCPHDIK FINGEANVQG WQPSPNDSNA |
| | GKGQYGSCCA EMDIWEANSM ASAYTPHPCT VTTPTRCQGN DCGDGDNRYG GVCDKDGCDF NSFRMGDKNF LGPGKTVNTN SKFTVVTQFL TSDNTTSGTL SEIRRLYVQN |
| | GRVIQNSKVN IPGMASTLDS ITESFCSTQK TVFGDTNSFA SKGGLRAMGN AFDKGMVLVL SIWDDHEAKM LWLDSNYPLD KSASAPGVAR GTCATTSGEP KDVESQSPNA |
| | QVIFSNIKYG DIGSTYSN |
| SEQ ID NO: 38 | MYRAIATASA LIAAVRAQQV CSLTQESKPS LNWSKCTSSG CSNVKGSVTI DANWRWTHQV SGSTNCYTGN KWDTSVCTSG KVCAERCCLD GADYASTYGI TSSGDQLSLS |
| | FVTKGPYSTN IGSRTYLMED ENTYQMFQLL GNEFTFDVDV SNIGCGLNGA LYFVSMDADG GKAKYPGNKA GAKYGTGYCD AQCPRDVKFI NGQANSDGWQ PSDSDVNGGI |
| | GNLGTCCPEM DIWEANSIST AYTPHPCTKL TQHSCTGDSC GGTYSNDRYG GTCDADGCDF NSYRQGNKTF YGPGSGFNVD TTKKVTVVTQ FHKGSNGRLS EITRLYVQNG |
| | KVIANSESKI AGVPGNSLTA DFCTKQKKVF NDPDDFTKKG AWSGMSDALE APMVLVMSLW HDHHSNMLWL DSTYPTDSTK LGSQRGSCST SSGVPADLEK NVPNSKVAFS |
| | NIKFGPIGST YKSDGTTPTN PTNPSEPSNT ANPNPGTVDQ WGQCGGSNYS GPTACKSGFT CKKINDFYSQ CQ |
| SEQ ID NO: 39 | MYSAAVLATF SFLLGAGAQQ VGTLKTESHP PLTIQKCAAG GTCTDEADSV VLDANWRWLH STSGSTNCYT GNTWDTTLCP DAATCTANCA FDGADYEGTY GITSSGDSLK |
| | LSFVTGSNVG SRTYLMDSET TYKEFALLGN EFTFTVDVSK LPCGLNGALY FVPMDADGGM SKYPTNKAGA KYGTGYCDAQ CPQDMKFVSG GANNEGWVPD SNSANSGTGN |
| | IGSCCSEFDV WEANSMSQAL TPHTCTVDGQ TACTGDDCAG NTGVCDADGC DFNPYRMGNT TFYGSGKTID TTKPFSVVTQ FITDDGTETG TLTEIKRFYV QDDVVYEQPN |
| | SDISGVSGNS ITDDFCTAQK TAFGDTDYFS QKGGMAAMGK KMADGMVLVL SIWDDYNVNM LWLDSDYPTT KDASTPGVSR GSCATTSGVP ATVEAASGSA YVTFSSIKYG |
| | PIGSTFKAPA DSSSPVVASS SPAAVAAVVS TSSAQAVPSH PAVSSSQAAV STPEAVSSAP EVPASSSAAQ SVAPTSTKPK CSKVSQSSTL ATSVAAPATT ATSAAVAATS |
| | AASSSGSVPL YGNCTGGKTC SEGTCVVQNP WYSQCVASS |
| SEQ ID NO: 40 | MFRAAALLAF TCLAMVSGQQ AGTNTAENHP QLQSQQCTTS GGCKPLSTKV VLDSNWRWVH STSGYTNCYT GNEWDTSLCP DGKTCAANCA LDGADYSGTY GITSTGTALT |
| | LKFVTGSNVG SRVYLMADDT HYQLLKLLNQ EFTFDVDMSN LPCGLNGALY LSAMDADGGM SKYPGNKAGA KYGTGYCDSQ CPKDIKFING EANVGNWTET GSNTGTGSYG |
| | TCCSEMDIWE ANNDAAAFTP HPCTTTGQTR CSGDDCARNT GLCDGDGCDF NSFRMGDKTF LGKGMTVDTS KPFTVVTQFL TNDNTSTGTL SEIRRIYIQN GKVIQNSVAN |
| | IPGVDPVNSI TDNFCAQQKT AFGDTNWFAQ KGGLKQMGEA LGNGMVLALS IWDDHAANML WLDSDYPTDK DPSAPGVARG TCATTSGVPS DVESQVPNSQ VVFSNIKFGD |
| | IGSTFSGTSS PNPPGGSTTS SPVTTSPTPP PTGPTVPQWG QCGGIGYSGS TTCASPYTCH VLNPYYSQCY |
| SEQ ID NO: 41 | MYRKLAVISA FLATARAQSA CTLQSETHPP LTWQKCSSGG TCTQQTGSVV IDANWRWTHA TNSSTNCYDG NTWSSTLCPD NETCAKNCCL DGAAYASTYG VTTSGNSLSI |
| | GFVTQSAQKN VGARLYLMAS DTTYQEFTLL GNEFSFDVDV SQLPCGLNGA LYFVSMDADG GVSKYPTNTA GAKYGTGYCD SQCPRDLKFI NGQANVEGWE PSSNNANTGI |
| | GGHGSCCSEM DIWEANSISE ALTPHPCTTV GQEICEGDGC GGTYSDNRYG GTCDPDGCDW NPYRLGNTSF YGPGSSFTLD TTKKLTVVTQ FETSGAINRY YVQNGVTFQQ |
| | PNAELGSYSG NELNDDYCTA EEAEFGGSSF SDKGGLTQFK KATSGGMVLV MSLWDDYYAN MLWLDSTYPT NETSSTPGAV RGSCSTSSGV PAQVESQSPN AKVTFSNIKF |
| | GPIGSTGNPS GGNPPGGNRG TTTTRRPATT TGSSPGPTQS HYGQCGGIGY SGPTVCASGT TCQVLNPYYS QCL |
| SEQ ID NO: 42 | MPSTYDIYKK LLLLASFLSA SQAQQVGTSK AEVHPSLTWQ TCTSGGSCTT VNGKVVVDAN WRWVHNVDGY NNCYTGNTWD TTLCPDDETC ASNCALEGAD YSGTYGVTTS |
| | GNSLRLNFVT QASQKNIGSR LYLMEDDSTY KMFKLLNQEF TFDVDVSNLP CGLNGAVYFV SMDADGGMAK YPANKAGAKY GTGYCDSQCP RDLKFINGMA NVEGWEPSAN |
| | DANAGTGNHG SCCAEMDIWE ANSISTAYTP HPCDTPGQVM CTGDSCGGTY SSDRYGGTCD PDGCDFNSYR QGNKTFYGPG MTVDTKSKIT VVTQFLTNDG TASGTLSEIK |
| | RFYVQNGKVI PNSESTWSGV SGNSITTAYC NAQKTLFGDT DVFTKHGGME GMGAALAEGM VLVLSLWDDH NSNMLWLDSN YPTDKPSTTP GVARGSCDIS SGDPKDVEAN |
| | DANAYVVYSN IKVGPIGSTF SGSTGGGSSS STTATSKTTT TSATKTTTTT TKTTTTTSAS STSTGGAQHW AQCGGIGWTG PTTCVAPYTC QKQNDYYSQC L |
| SEQ ID NO: 43 | MISKVLAFTS LLAAARAQQA GTLTTETHPP LSVSQCTASG CTTSAQSIVV DANWRWLHST TGSTNCYTGN TWDKTLCPDG ATCAANCALD GADYSGVYGI TTSGNSIKLN |
| | FVTKGANTNV GSRTYLMAAG STTQYQMLKL LNQEFTFDVD VSNLPCGLNG ALYFAAMDAD GGLSRFPTNK AGAKYGTGYC DAQCPQDIKF INGVANSVGW TPSSNDVNAG |
| | AGQYGSCCSE MDIWEANKIS AAYTPHPCSV DTQTRCTGTD CGIGARYSSL CDADGCDFNS YRQGNTSFYG AGLTVNTNKV FTVVTQFITN DGTASGTLKE IRRFYVQNGV |
| | VIPNSQSTIA GVPGNSITDS FCAAQKTAFG DTNEFATKGG LATMSKALAK GMVLVMSIWD DHTANMLWLD APYPATKSPS APGVTRGSCS ATSGNPVDVE ANSPGSSVTF |
| | SNIKWGPINS TYTGSGAAPS VPGTTTVSSA PASTATSGAG GVAKYAQCGG SGYSGATACV SGSTCVALNP YYSQCQ |
| SEQ ID NO: 44 | MFPAATLFAF SLFAAVYGQQ VGTQLAETHP RLTWQKCTRS GGCQTQSNGA IVLDANWRWV HNVGGYTNCY TGNTWNTSLC PDGATCAKNC ALDGANYQST YGITTSGNAL |
| | TLKFVTQSEQ KNIGSRVYLL ESDTKYQLFN PLNQEFTFDV DVSQLPCGLN GAVYFSAMDA DGGMSKFPNN AAGAKYGTGY CDSQCPRDIK FINGEANVQG WQPSPNDTNA |
| | GTGNYGACCN EMDVWEANSI STAYTPHPCT QQGLVRCSGT ACGGGSNRYG SICDPDGCDF NSFRMGDKSF YGPGLTVNTQ QKFTVVTQFL TNNNSSSGTL REIRRLYVQN |
| | GRVIQNSKVN IPGMPSTMDS VTTEFCNAQK TAFNDTFSFQ QKGGMANMSE ALRRGMVLVL SIWDDHAANM LWLDSNYPTD RPASQPGVAR GTCPTSSGKP SDVENSTANS |
| | QVIYSNIKFG DIGSTYSA |
| SEQ ID NO: 45 | MKGSISYQIY KGALLLSALL NSVSAQQVGT LTAETHPALT WSKCTAGXCS QVSGSVVIDA NWPXVHSTSG STNCYTGNTW DATLCPDDVT CAANCAVDGA RRQHLRVTTS |
| | GNSLRINFVT TASQKNIGSR LYLLENDTTY QKFNLLNQEF TFDVDVSNLP CGLNGALYFV DMDADGGMAK YPTNKAGAKY GTGYCDSQCP RDLKFINGQA NVDGWTPSKN |
| | DVNSGIGNHG SCCAEMDIWE ANSISNAVTP HPCDTPSQTM CTGQRCGGTY STDRYGGTCD PDGCDFNPYR MGVTNFYGPG ETIDTKSPFT VVTQFLTNDG TSTGTLSEIK |
| | RFYVQGGKVI GNPQSTIVGV SGNSITDSWC NAQKSAFGDT NEFSKHGGMA GMGAGLADGM VLVMSLWDDH ASDMLWLDST YPTNATSTTP GAKRGTCDIS RRPNTVESTY |
| | PNAYVIYSNI KTGPLNSTFT GGTTSSSSTT TTTSKSTSTS SSSKTTTTVT TTTTSSGSSG TGARDWAQCG GNGWTGPTTC VSPYTCTKQN DWYSQCL |
| SEQ ID NO: 46 | MFRTAALTAF TLAAVVLGQQ VGTLTAENHP ALSIQQCTAS GCTTQQKSVV LDSNWRWTHS LPVHTNCYTG NAWDASLCPD PTTCATNCAI DGADYSGTYG ITTSGNALTL |
| | RFVTNGPYSK NIGSRVYLLD DADHYKMFDL KNQEFTFDVD MSGLPCGLNG ALYFSEMPAD GGKAAHTSNK AGAKYGTGYC DAQCPHDIKW INGEANILDW SASATDANAG |
| | NGRYGACCAE MDIWEANSEA TAYTPHVCRD EGLYRCSGTE CGDGDNRYGG VCDKDGCDFN SYRMGDKNFL GRGKTIDTTK KITVVTQFIT DDNTSSGNLV EIRRVYVQDG |
| | VTYQNSFSTF PSLSQYNSIS DDFCVAQKTL FGDNQYYNTH GGTEKMGDAM ANGMVLIMSL WSDHAAHMLW LDSDYPLDKS PSEPGVSRGA CATTTGDPDD VVANHPNASV |
| | TFSNIKYGPI GSTYGGSTPP VSSGNTSAPP VTSTTSSGPT TPTGPTGTVP KWGQCGGNGY SGPTTCVAGS TCTYSNDWYS QCL |
| SEQ ID NO: 47 | MYQRALLFSA LLSVSRAQQA GTAQEEVHPS LTWQRCEASG SCTEVAGSVV LDSNWRWTHS VDGYTNCYTG NEWDATLCPD NESCAQNCAV DGADYEATYG ITSNGDSLTL |
| | KFVTGSNVGS RVYLMEDDET YQMFDLLNNE FTFDVDVSNL PCGLNGALYF TSMDADGGLS KYEGNTAGAK YGTGYCDSQC PRDIKFINGL GNVEGWEPSD SDANAGVGGM |
| | GTCCPEMDIW EANSISTAYT PHPCDSVEQT MCEGDSCGGT YSDDRYGGTC DPDGCDFNSY RMGNTSFYGP GAIIDTSSKF TVVTQFIADG GSLSEIKRFY VQNGEVIPNS |
| | ESNISGVEGN SITSEFCTAQ KTAFGDEDIF AQHGGLSAMG DAASAMVLIL SIWDDHHSSM MWLDSSYPTD ADPSQPGVAR GTCEQGAGDP DVVESEHADA SVTFSNIKFG |
| | PIGSTF |
| SEQ ID NO: 48 | MYRAIATASA LIAAVRAQQV CSLTTETKPA LTWSKCTSSG CSNVQGSVTI DANWRWTHQV SGSTNCHTGN KWDTSVCTSG KVCAEKCCVD GADYASTYGI TSSGNQLSLS |
| | FVTKGSYGTN IGSRTYLMED ENTYQMFQLL GNEFTFDVDV SNIGCGLNGA LYFVSMDADG GKAKYPGNKA GAKYGTGYCD AQCPRDVKFI NGQANSDGWE PSKSDVNGGI |
| | GNLGTCCPEM DIWEANSIST AYTPHPCTKL TQHACTGDSC GGTYSNDRYG GTCDADGCDF NAYRQGNKTF YGPGSGFNVD TTKKVTVVTQ FHKGSNGRLS EITRLYVQNG |
| | KVIANSESKI AGNPGSSLTS DFCTTQKKVF GDIDDFAKKG AWNGMSDALE APMVLVMSLW HDHHSNMLWL DSTYPTDSTA LGSQRGSCST SSGVPADLEK NVPNSKVAFS |
| | NIKFGPIGST YNKEGTQPQP TNPTNPNPTN PTNPGTVDQW GQCGGTNYSG PTACKSPFTC KKINDFYSQC Q |
| SEQ ID NO: 49 | MFRTAALTAF TLAAVVLGQQ VGTLAAENHP ALSIQQCTAS GCTTQQKSVV LDSNWRWTHS TAGATNCYTG NAWDSSLCPN PTTCATNCAI DGADYSGTYG ITTSGNSLTL |
| | RFVTNGQYSE NIGSRVYLLD DADHYKLFNL KNQEFTFDVD MSGLPCGLNG ALYFSEMAAD GGKAAHTGNN AGAKYGTGYC DAQCPHDIKW INGEANILDW SGSATDPNAG |
| | NGRYGACCAE MDIWEANSEA TAYTPHVCRD EGLYRCSGTE CGDGDNRYGG VCDKDGCDFN SYRMGDKNFL GRGKTIDTTK KITVVTQFIT DDNTPTGNLV EIRRVYVQDG |
| | VTYQNSFSTF PSLSQYNSIS DDFCVAQKTL FGDNQYYNTH GGTEKMGDSL ANGMVLIMSL WSDHAAHMLW LDSDYPLDKS PSEPGVSRGA CATTTGDPDD VVANHPNASV |
| | TFSNIKYGPI GSTYGGSTPP VSSGNTSVPP VTSTTSSGPT TPTGPTGTVP KWGQCGGIGY SGPTSCVAGS TCTYSNEWYS QCL |
| SEQ ID NO: 50 | MYQKLALISA FLATARAQSA CTLQAETHPP LTWQKCSSGG TCTQQTGSVV IDANWRWTHA TNSSTNCYDG NTWSSTLCPD NETCAKNCCL DGAAYASTYG VTTSADSLSI |
| | GFVTQSAQKN VGARLYLMAS DTTYQEFTLL GNEFSFDVDV SQLPCGLNGA LYFVSMDADG GVTKYPTNTA GAKYGTGYCD SQCPRDLKFI NGQANVEGWE PSSNNANTGI |
| | GGHGSCCSEM DIWEANSISE ALTPHPCTTV GQEICEGDSC GGTYSGDRYG GTCDPDGCDW NPYRLGNTSF YGPGSSFTLD TTKKLTVVTQ FETSGAINRY YVQNGVTFQQ |
| | PNAELGDYSG NSLDDDYCAA EEAEFGGSSF SDKGGLTQFK KATSGGMVLV MSLWDDYYAN MLWLDSTYPT DETSSTPGAV RGSSSTSSGV PAQLESNSPN AKVVYSNIKF |
| | GPIGSTGNPS GGNPPGGNPP GTTTPRPATS TGSSPGPTQT HYGQCGGIGY IGPTVCASGS TCQVLNPYYS QCL |
| SEQ ID NO: 51 | MTWQSCTAKG SCTNKNGKIV IDANWRWLHK KEGYDNCYTG NEWDATACPD NKACAANCAV DGADYSGTYG ITAGSNSLKL KFITKGSYST NIGSRTYLMK DDTTYEMFKF |
| | TGNQEFTFDV DVSNLPCGFN GALYFVSMDA DGGLKKYSTN KAGAKYGTGY CDAQCPRDLK FINGEGNVEG WKPSSNDANA GVGGHGSCCA EMDIWEANSV STAVTPHSCS |
| | TIEQSRCDGD GCGGTYSADR YAGVCDPDGC DFNSYRMGVK DFYGKGKTVD TSKKFTVVTQ FIGTGDAMEI KRFYVQNGKT IAQPASAVPG VEGNSITTKF CDQQKAVFGD |
| | TYTFKDKGGM ANMAKALANG MVLVMSLWDD HYSNMLWLDS TYPTDKNPDT DLGTGRGECE TSSGVPADVE SQHADATVVY SNIKFGPLNS TFG |
| SEQ ID NO: 52 | MASAISFQVY RSALILSAFL PSITQAQQIG TYTTETHPSM TWETCTSGGS CATNQGSVVM DANWRWVHQV GSTTNCYTGN TWDTSICDTD ETCATECAVD GADYESTYGV |
| | TTSGSQIRLN FVTQNSNGAN VGSRLYMMAD NTHYQMFKLL NQEFTFDVDV SNLPCGLNGA LYFVTMDEDG GVSKYPNNKA GAQYGVGYCD SQCPRDLKFI QGQANVEGWT |
| | PSSNNENTGL GNYGSCCAEL DIWESNSISQ ALTPHPCDTA TNTMCTGDAC GGTYSSDRYA GTCDPDGCDF NPYRMGNTTF YGPGKTIDTN SPFTVVTQFI TDDGTDTGTL |
| | SEIRRYYVQN GVTYAQPDSD ISGITGNAIN ADYCTAENTV FDGPGTFAKH GGFSAMSEAM STGMVLVMSL WDDYYADMLW LDSTYPTNAS SSTPGAVRGS CSTDSGVPAT |
| | IESESPDSYV TYSNIKVGPI GSTFSSGSGS GSSGSGSSGS ASTSTTSTKT TAATSTSTAV AQHYSQCGGQ DWTGPTTCVS PYTCQVQNAY YSQCL |
| SEQ ID NO: 53 | MKAYFEYLVA ALPLLGLATA QQVGKQTTET HPKLSWKKCT GKANCNTVNA EVVIDSNWRW LHDSSGKNCY DGNKWTSACS SATDCASKCQ LDGANYGTTY GASTSGDALT |
| | LKFVTKHEYG TNIGSRFYLM NGASKYQMFT LMNNEFAFDV DLSTVECGLN AALYFVAMEE DGGMASYSSN KAGAKYGTGY CDAQCARDLK FVGGKANIEG WTPSTNDANA |
| | GVGPYGGCCA EIDVWESNAH SFAFTPHACK TNKYHVCERD NCGGTYSEDR FAGLCDANGC DYNPYRMGNT DFYGKGKTVD TSKKFTVVSR FEENKLTQFF VQNGQKIEIP |
| | GPKWDGIPSD NANITPEFCS AQFQAFGDRD RFAEVGGFAQ LNSALRMPMV LVMSIWDDHY ANMLWLDSVY PPEKEGQPGA ARGDCPQSSG VPAEVESQYA NSKVVYSNIR |
| | FGPVGSTVNV |
| SEQ ID NO: 54 | MFSKFALTGS LLAGAVNAQG VGTQQTETHP QMTWQSCTSP SSCTTNQGEV VIDSNWRWVH DKDGYVNCYT GNTWNTTLCP DDKTCAANCV LDGADYSSTY GITTSGNALS |
| | LQFVTQSSGK NIGSRTYLME SSTKYHLFDL IGNEFAFDVD LSKLPCGLNG ALYFVTMDAD GGMAKYSTNT AGAEYGTGYC DSQCPRDLKF INGQGNVEGW TPSTNDANAG |
| | VGGLGSCCSE MDVWEANSMD MAYTPHPCET AAQHSCNADE CGGTYSSSRY AGDCDPDGCD WNPFRMGNKD FYGSGDTVDT SQKFTVVTQF HGSGSSLTEI SQYYIQGGTK |
| | IQQPNSTWPT LTGYNSITDD FCKAQKVEFN DTDVFSEKGG LAQMGAGMAD GMVLVMSLWD DHYANMLWLD STYPVDADAS SPGKQRGTCA TTSGVPADVE SSDASATVIY |
| | SNIKFGPIGA TY |
| SEQ ID NO: 55 | MFPAAALLSF TLLAVASAQQ IGTNTAEVHP SLTVSQCTTS GGCTSSTQSI VLDANWRWLH STSGYTNCYT GNQWNSDLCP DPDTCATNCA LDGASYESTY GISTDGNAVT |
| | LNFVTQGSQT NVGSRVYLLS DDTHYQTFSL LNKEFSFDVD ASNIGCGING AVYFVQMDAD GGLSKYSSNK AGAQYGTGYC DSQCPQDIKF INGEANLLDW NATSANSGTG |
| | SYGSCCPEMD IWEANKYAAA YTPHPCSVSG QTRCTGTSCG AGSERYDGYC DKDGCDFNSW RMGNETFLGP GMTIDTNKKF TIVTQFITDD NTANGTLSEI RRLYVQGGTV |
| | IQNSVANQPN IPKVNSITDS FCTAQKTEFG DQDYFGTIGG LSQMGKAMSD MVLVMSIWDD YDAEMLWLDS NYPTSGSAST PGISRGPCSA TSGLPATVES QQASASVTYS |
| | NIKWGDIGST YSGSGSSGSS SSSSSSAASA STSTHTSAAA TATSSAAAAT GSPVPAYGQC GGQSYTGSTT CASPYVCKVS NAYYSQCLPA |
| SEQ ID NO: 56 | MKRALCASLS LLAAAVAQQV GTNEPEVHPK MTWKKCSSGG SCSTVNGEVV IDGNWRWIHN IGGYENCYSG NKWTSVCSTN ADCATKCAME GAKYQETYGV STSGDALTLK |
| | FVQQNSSGKN VGSRMYLMNG ANKYQMFTLK NNEFAFDVDL SSVECGMNSA LYFVPMKEDG GMSTEPNNKA GAKYGTGYCD AQCARDLKFI GGKGNIEGWQ PSSTDSSAGI |
| | GAQGACCAEI DIWESNKNAF AFTPHPCENN EYHVCTEPNC GGTYADDRYG GGCDANGCDY NPYRMGNPDF YGPGKTIDTN RKFTVISRFE NNRNYQILMQ DGVAHRIPGP |
| | KFDGLEGETG ELNEQFCTDQ FTVFDERNRF NEVGGWSKLN AAYEIPMVLV MSIWSDHFAN MLWLDSTYPP EKAGQPGSAR GPCPADGGDP NGVVNQYPNA KVIWSNVRFG |
| | PIGSTYQVD |
| SEQ ID NO: 57 | MQLTKAGVFL GALMGGAAAQ QVGTQTAENH PKMTWKKCTG KASCTTVNGE VVIDANWRWL HDASSKNCYD GNRWTDSCRT ASDCAAKCSL EGADYAKTYG ASTSGDALSL |
| | KFVTRHDYGT NIGSRFYLMN GASKYQMFSL LGNEFAFDVD LSTIECGLNS ALYFVAMEED GGMKSYSSNK AGAKYGTGYC DAQCARDLKF VGGKANIEGW KPSSNDANAG |
| | VGPYGACCAE IDVWESNAHA FAFTPHPCTD NKYHVCQDSN CGGTYSDDRF AGKCDANGCD INPYRLGNTD FYGKGKTVDT SKKFTVVTRF ERDALTQFFV QNNKRIDMPS |
| | PALEGLPATG AITAEYCTNV FNVFGDRNRF DEVGGWSQLQ QALSLPMVLV MSIWDDHYSN MLWLDSVYPP DKEGSPGAAR GDCPQDSGVP SEVESQIPGA TVVWSNIRFG |
| | PVGSTVNV |
| SEQ ID NO: 58 | MYRIVATASA LIAAARAQQV CSLNTETKPA LTWSKCTSSG CSDVKGSVVI DANWRWTHQT SGSTNCYTGN KWDTSICTDG KTCAEKCCLD GADYSGTYGI TSSGNQLSLG |
| | FVTNGPYSKN IGSRTYLMEN ENTYQMFQLL GNEFTFDVDV SGIGCGLNGA PHFVSMDEDG GKAKYSGNKA GAKYGTGYCD AQCPRDVKFI NGVANSEGWK PSDSDVNAGV |
| | GNLGTCCPEM DIWEANSIST AFTPHPCTKL TQHSCTGDSC GGTYSSDRYG GTCDADGCDF NAYRQGNKTF YGPGSNFNID TTKKMTVVTQ FHKGSNGRLS EITRLYVQNG |
| | KVIANSESKI AGNPGSSLTS DFCSKQKSVF GDIDDFSKKG GWNGMSDALS APMVLVMSLW HDHHSNMLWL DSTYPTDSTK VGSQRGSCAT TSGKPSDLER DVPNSKVSFS |
| | NIKFGPIGST YKSDGTTPNP PASSSTTGSS TPTNPPAGSV DQWGQCGGQN YSGPTTCKSP FTCKKINDFY SQCQ |
| SEQ ID NO: 59 | MYQRALLFSA LATAVSAQQV GTQKAEVHPA LTWQKCTAAG SCTDQKGSVV IDANWRWLHS TEDTTNCYTG NEWNAELCPD NEACAKNCAL DGADYSGTYG VTADGSSLKL |
| | NFVTSANVGS RLYLMEDDET YQMFNLLNNE FTFDVDVSNL PCGLNGALYF VSMDADGGLS KYPGNKAGAK YGTGYCDSQC PRDLKFINGE ANVEGWKPSD NDKNAGVGGY |
| | GSCCPEMDIW EANSISTAYT PHPCDGMEQT RCDGNDCGGT YSSTRYAGTC DPDGCDFNSF RMGNESFYGP GGLVDTKSPI TVVTQFVTAG GTDSGALKEI RRVYVQGGKV |
| | IGNSASNVAG VEGDSITSDF CTAQKKAFGD EDIFSKHGGL EGMGKALNKM ALIVSIWDDH ASSMMWLDST YPVDADASTP GVARGTCEHG LGDPETVESQ HPDASVTFSN |
| | IKFGPIGSTY KSV |
| SEQ ID NO: 60 | MSALNSFNMY KSALILGSLL ATAGAQQIGT YTAETHPSLS WSTCKSGGSC TTNSGAITLD ANWRWVHGVN TSTNCYTGNT WNTAICDTDA SCAQDCALDG ADYSGTYGIT |
| | TSGNSLRLNF VTGSNVGSRT YLMADNTHYQ IFDLLNQEFT FTVDVSNLPC GLNGALYFVT MDADGGVSKY PNNKAGAQYG VGYCDSQCPR DLKFIAGQAN VEGWTPSTNN |
| | SNTGIGNHGS CCAELDIWEA NSISEALTPH PCDTPGLTVC TADDCGGTYS SNRYAGTCDP DGCDFNPYRL GVTDFYGSGK TVDTTKPFTV VTQFVTDDGT SSGSLSEIRR |
| | YYVQNGVVIP QPSSKISGIS GNVINSDFCA AELSAFGETA SFTNHGGLKN MGSALEAGMV LVMSLWDDYS VNMLWLDSTY PANETGTPGA ARGSCPTTSG NPKTVESQSG |
| | SSYVVFSDIK VGPFNSTFSG GTSTGGSTTT TASGTTSTKA STTSTSSTST GTGVAAHWGQ CGGQGWTGPT TCASGTTCTV VNPYYSQCL |
| SEQ ID NO: 61 | MRTAKFATLA ALVASAAAQQ ACSLTTERHP SLSWNKCTAG GQCQTVQASI TLDSNWRWTH QVSGSTNCYT GNKWDTSICT DAKSCAQNCC VDGADYTSTY GITTNGDSLS |
| | LKFVTKGQHS TNVGSRTYLM DGEDKYQTFE LLGNEFTFDV DVSNIGCGLN GALYFVSMDA DGGLSRYPGN KAGAKYGTGY CDAQCPRDIK FINGEANIEG WTGSTNDPNA |
| | GAGRYGTCCS EMDIWEANNM ATAFTPHPCT IIGQSRCEGD SCGGTYSNER YAGVCDPDGC DFNSYRQGNK TFYGKGMTVD TTKKITVVTQ FLKDANGDLG EIKRFYVQDG |
| | KIIPNSESTI PGVEGNSITQ DWCDRQKVAF GDIDDFNRKG GMKQMGKALA GPMVLVMSIW DDHASNMLWL DSTFPVDAAG KPGAERGACP TTSGVPAEVE AEAPNSNVVF |
| | SNIRFGPIGS TVAGLPGAGN GGNNGGNPPP PTTTTSSAPA TTTTASAGPK AGRWQQCGGI GFTGPTQCEE PYICTKLNDW YSQCL |
| SEQ ID NO: 62 | MMYKKFAALA ALVAGASAQQ ACSLTAENHP SLTWKRCTSG GSCSTVNGAV TIDANWRWTH TVSGSTNCYT GNQWDTSLCT DGKSCAQTCC VDGADYSSTY GITTSGDSLN |
| | LKFVTKHQYG TNVGSRVYLM ENDTKYQMFE LLGNEFTFDV DVSNLGCGLN GALYFVSMDA DGGMSKYSGN KAGAKYGTGY CDAQCPRDLK FINGEANVGN WTPSTNDANA |
| | GFGRYGSCCS EMDVWEANNM ATAFTPHPCT TVGQSRCEAD TCGGTYSSDR YAGVCDPDGC DFNAYRQGDK TFYGKGMTVD TNKKMTVVTQ FHKNSAGVLS EIKRFYVQDG |
| | KIIANAESKI PGNPGNSITQ EYCDAQKVAF SNTDDFNRKG GMAQMSKALA GPMVLVMSVW DDHYANMLWL DSTYPIDQAG APGAERGACP TTSGVPAEIE AQVPNSNVIF |
| | SNIRFGPIGS TVPGLDGSNP GNPTTTVVPP ASTSTSRPTS STSSPVSTPT GQPGGCTTQK WGQCGGIGYT GCTNCVAGTT CTQLNPWYSQ CL |
| SEQ ID NO: 63 | MASLSLSKIC RNALILSSVL STAQGQQVGT YQTETHPSMT WQTCGNGGSC STNQGSVVLD ANWRWVHQTG SSSNCYTGNK WDTSYCSTND ACAQKCALDG ADYSNTYGIT |
| | TSGSEVRLNF VTSNSNGKNV GSRVYMMADD THYEVYKLLN QEFTFDVDVS KLPCGLNGAL YFVVMDADGG VSKYPNNKAG AKYGTGYCDS QCPRDLKFIQ GQANVEGWVS |
| | STNNANTGTG NHGSCCAELD IWESNSISQA LTPHPCDTPT NTLCTGDACG GTYSSDRYSG TCDPDGCDFN PYRVGNTTFY GPGKTIDTNK PITVVTQFIT DDGTSSGTLS |
| | EIKRFYVQDG VTYPQPSADV SGLSGNTINS EYCTAENTLF EGSGSFAKHG GLAGMGEAMS TGMVLVMSLW DDYYANMLWL DSNYPTNEST SKPGVARGTC STSSGVPSEV |
| | EASNPSAYVA YSNIKVGPIG STFKS |
| SEQ ID NO: 64 | MYRAIATASA LIAAVRAQQV CSLTPETKPA LSWSKCTSSG CSNVQGSVTI DANWRWTHQL SGSTNCYTGN KWDTSICTSG KVCAEKCCID GAEYASTYGI TSSGNQLSLS |
| | FVTKGAYGTN IGSRTYLMED ENTYQMFQLL GNEFTFDVDV SNIGCGLNGA LYFVSMDADG GKAKYPGNKA GAKYGTGYCD AQCPRDVKFI NGQANSDGWQ PSKSDVNAGI |
| | GNMGTCCPEM DIWEANSIST AYTPHPCTKL TQHSCTGDSC GGTYSNDRYG GTCDADGCDF NAYRQGNKTF YGPGSGFNVD TTKKVTVVTQ FHKGSNGRLS EITRLYVQNG |
| | KVIANSESKI AGVPGSSLTP EFCTAQKKVF GDTDDFAKKG AWSGMSDALE APMVLVMSLW HDHHSNMLWL DSTYPTDSTK LGAQRGSCST SSGVPADLEK NVPNSKVAFS |
| | NIKFGPIGST YKEGVPEPTN PTNPTNPTNP TNPGTVDQWA QCGGTNYSGP TACKSPFTCK KINDFYSQCQ |
| SEQ ID NO: 65 | MFPKSSLLVL SFLATAYAQQ VGTQTAEVHP SLNWARCTSS GCTNVAGSVT LDANWRWLHT TSGYTNCYTG NSWNTTLCPD GATCAQNCAL DGANYQSTCG ITTSGNALTL |
| | KFVTQGEQKN IGSRVYLMAS ESRYEMFGLL NKEFTFDVDV SNLPCGLNGA LYFSSMDADG GMAKNPGNKA GAKYGTGYCD SQCPRDIKFI NGEANVAGWN GSPNDTNAGT |
| | GNWGACCNEM DIWEANSISA AYTPHPCTVQ GLSRCSGTAC GTNDRYGTVC DPDGCDFNSY RMGDKTYYGP GGTGVDTRSK FTVVTQFLTN NNSSSGTLSE IRRLYVQNGR |
| | VVQNSKVNIP GMSNTLDSIT TGFCDSQKTA FGDTRSFQNK GGMSAMGQAL GAGMVLVLSV WDDHAANMLW LDSNYPVDAD PSKPGIARGT CSTTSGKPTD VEQSAANSSV |
| | TFSNIKFGDI GTTYTGGSVT TTPGNPGTTT STAPGAVQTK WGQCGGQGWT GPTRCESGST CTVVNQWYSQ CI |
| SEQ ID NO: 66 | MFRKAALLAF SFLAIAHGQQ VGTNQAENHP SLPSQHCTAS GCTTSSTSVV LDANWRWVHT TTGYTNCYTG QTWDASICPD GVTCAKACAL DGADYSGTYG ITTSGNALTL |
| | QFVKGTNVGS RVYLLQDASN YQLFKLINQE FTFDVDMSNL PCGLNGAVYL SQMDQDGGVS RFPTNTAGAK YGTGYCDSQC PRDIKFINGE ANVAGWTGSS SDPNSGTGNY |
| | GTCCSEMDIW EANSVAAAYT PHPCSVNQQT RCTGADCGQD ANRYKGVCDP DGCDFNSFRM GDQTFLGKGL TVDTSRKFTI VTQFISDDGT SSGNLAEIRR FYVQDGKVIP |
| | NSKVNIAGCD AVNSITDKFC TQQKTAFGDT NRFADQGGLK QMGAALKSGM VLALSLWDDH AANMLWLDSD YPTTADASKP GVARGTCPNT SGVPKDVESQ SGSATVTYSN |
| | IKWGDLNSTF SGTASNPTGP SSSPSGPSSS SSSTAGSQPT QPSSGSVAQW GQCGGIGYSG ATGCVSPYTC HVVNPYYSQC Y |
| SEQ ID NO: 67 | TETHPRLTWK RCTSGGNCST VNGAVTIDAN WRWTHTVSGS TNCYTGNEWD TSICSDGKSC AQTCCVDGAD YSSTYGITTS GDSLNLKFVT KHQHGTNVGS RVYLMENDTK |
| | YQMFELLGNE FTFDVDVSNL GCGLNGALYF VSMDADGGMS KYSGNKAGAK YGTGYCDAQC PRDLKFINGE ANIENWTPST NDANAGFGRY GSCCSEMDIW EANNMATAFT |
| | PHPCTIIGQS RCEGNSCGGT YSSERYAGVC DPDGCDFNAY RQGDKTFYGK GMTVDTTKKM TVVTQFHKNS AGVLSEIKRF YVQDGKIIAN AESKIPGNPG NSITQEWCDA |
| | QKVAFGDIDD FNRKGGMAQM SKALEGPMVL VMSVWDDHYA NMLWLDSTYP IDKAGTPGAE RGACPTTSGV PAEIEAQVPN SNVIFSNIRF GPIGSTVPGL DGSTPSNPTA |
| | TVAPPTSTTT SVRSSTTQIS TPTSQPGGCT TQKWGQCGGI GYTGCTNCVA GTTCTELNPW YSQCL |
| SEQ ID NO: 68 | MFHKAVLVAF SLVTIVHGQQ AGTQTAENHP QLSSQKCTAG GSCTSASTSV VLDSNWRWVH TTSGYTNCYT GNTWDASICS DPVSCAQNCA LDGADYAGTY GITTSGDALT |
| | LKFVTGSNVG SRVYLMEDET NYQMFKLMNQ EFTFDVDVSN LPCGLNGAVY FVQMDQDGGT SKFPNNKAGA KFGTGYCDSQ CPQDIKFING EANIVDWTAS AGDANSGTGS |
| | FGTCCQEMDI WEANSISAAY TPHPCTVTEQ TRCSGSDCGQ GSDRFNGICD PDGCDFNSFR MGNTEFYGKG LTVDTSQKFT IVTQFISDDG TADGNLAEIR RFYVQNGKVI |
| | PNSVVQITGI DPVNSITEDF CTQQKTVFGD TNNFAAKGGL KQMGEAVKNG MVLALSLWDD YAAQMLWLDS DYPTTADPSQ PGVARGTCPT TSGVPSQVEG QEGSSSVIYS |
| | NIKFGDLNST FTGTLTNPSS PAGPPVTSSP SEPSQSTQPS QPAQPTQPAG TAAQWAQCGG MGFTGPTVCA SPFTCHVLNP YYSQCY |
| SEQ ID NO: 69 | MFRAAALLAF TCLAMVSGQQ AGTNTAENHP QLQSQQCTTS GGCKPLSTKV VLDSNWRWVH STSGYTNCYT GNEWNTSLCP DGKTCAANCA LDGADYSGTY GITSTGTALT |
| | LKFVTGSNVG SRVYLMADDT HYQLLKLLNQ EFTFDVDMSN LPCGLNGALY LSAMDADGGM SKYPGNKAGA KYGTGYCDSQ CPKDIKFING EANVGNWTET GSNTGTGSYG |
| | TCCSEMDIWE ANNDAAAFTP HPCTTTGQTR CSGDDCARNT GLCDHGDGCD FNSFRMGDKT FLGKGMTVDT SKPFTDVTQF LTNDNTSTGT LSEIRRIYIQ NGKVIQNSVA |
| | NIPGVDPVNS ITDNFCAQQK TAFGDTNWFA QKGGLKQMGE ALGNGMVLAL SIWDDHAANM LWLDSDYPTD KDPSAPGVAR GTCATTSGVP SDVESQVPNS QVVFSNIKFG |
| | DIGSTFSGTS SPNPPGGSTT SSPVTTSPTP PPTGPTVPQW GQCGGIGYSG STTCASPYTC HVLNPYYSQC Y |
| SEQ ID NO: 70 | MMMKQYLQYL AAALPLVGLA AGQRAGNETP ENHPPLTWQR CTAPGNCQTV NAEVVIDANW RWLHDDNMQN CYDGNQWTNA CSTATDCAEK CMIEGAGDYL GTYGASTSGD |
| | ALTLKFVTKH EYGTNVGSRF YLMNGPDKYQ MFNLMGNELA FDVDLSTVEC GINSALYFVA MEEDGGMASY PSNQAGARYG TGYCDAQCAR DLKFVGGKAN IEGWKSSTSD |
| | PNAGVGPYGS CCAEIDVWES NAYAFAFTPH ACTTNEYHVC ETTNCGGTYS EDRFAGKCDA NGCDYNPYRM GNPDFYGKGK TLDTSRKFTV VSRFEENKLS QYFIQDGRKI |
| | EIPPPTWEGM PNSSEITPEL CSTMFDVFND RNRFEEVGGF EQLNNALRVP MVLVMSIWDD HYANMLWLDS IYPPEKEGQP GAARGDCPTD SGVPAEVEAQ FPDAQVVWSN |
| | IRFGPIGSTY DF |
| SEQ ID NO: 71 | MYRSATFLTF ASLVLGQQVG TYTAERHPSM PIQVCTAPGQ CTRESTEVVL DANWRWTHIT NGYTNCYTGN EWNATACPDG ATCAKNCAVD GADYSGTYGI TTPSSGALRL |
| | QFVKKNDNGQ NVGSRVYLMA SSDKYKLFNL LNKEFTFDVD VSKLPCGLNG AVYFSEMLED GGLKSFSGNK AGAKYGTGYC DSQCPQDIKF INGEANVEGW GGADGNSGTG |
| | KYGICCAEMD IWEANSDATA YTPHVCSVNE QTRCEGVDCG AGSDRYNSIC DKDGCDFNSY RLGNREFYGP GKTVDTTRPF TIVTQFVTDD GTDSGNLKSI HRYYVQDGNV |
| | IPNSVTEVAG VDQTNFISEG FCEQQKSAFG DNNYFGQLGG MRAMGESLKK MVLVLSIWDD HAVNMNWLDS IFPNDADPEQ PGVARGRCDP ADGVPATIEA AHPDAYVIYS |
| | NIKFGAINST FTAN |
| SEQ ID NO: 72 | MYRTLAFASL SLYGAARAQQ VGTSTAENHP KLTWQTCTGT GGTNCSNKSG SVVLDSNWRW AHNVGGYTNC YTGNSWSTQY CPDGDSCTKN CAIDGADYSG TYGITTSNNA |
| | LSLKFVTKGS FSSNIGSRTY LMETDTKYQM FNLINKEFTF DVDVSKLPCG LNGALYFVEM AADGGIGKGN NKAGAKYGTG YCDSQCPHDI KFINGKANVE GWNPSDADPN |
| | GGAGKIGACC PEMDIWEANS ISTAYTPHPC RGVGLQECSD AASCGDGSNR YDGQCDKDGC DFNSYRMGVK DFYGPGATLD TTKKMTVITQ FLGSGSSLSE IKRFYVQNGK |
| | VYKNSQSAVA GVTGNSITES FCTAQKKAFG DTSSFAALGG LNEMGASLAR GHVLIMSLWG DHAVNMLWLD STYPTDADPS KPGAARGTCP TTSGKPEDVE KNSPDATVVF |
| | SNIKFGPIGS TFAQPA |
| SEQ ID NO: 73 | MYQKLALISA FLATARAQSA CTLQAETHPP LTWQKCSSGG TCTQQTGSVV IDANWRWTHA TNSSTNCYDG NTWSSTLCPD NETCAKNCCL DGAAYASTYG VTTSADSLSI |
| | GFVTQSAQKN VGARLYLMAS DTTYQEFTLL GNEFSFDVDV SQLPCGLNGA LYFVSMDADG GVSKYPTNTA GAKYGTGYCD SQCPRDLKFI NGQANVEGWE PSSNNANTGI |
| | GGHGSCCSEM DIWEANSISE ALTPHPCTTV GQEICDGDSC GGTYSGDRYG GTCDPDGCDW NPYRLGNTSF YGPGSSFTLD TTKKLTVVTQ FETSGAINRY YVQNGVTFQQ |
| | PNAELGDYSG NSLDDDYCAA EEAEFGGSSF SDKGGLTQFK KATSGGMVLV MSLWDDYYAN MLWLDSTYPT NETSSTPGAV RGSCSTSSGV PAQLESNSPN AKVVYSNIKF |
| | GPIGSTGNSS GGNPPGGNPP GTTTTRRPAT STGSSPGPTQ THYGQCGGIG YSGPTVCASG STCQVLNPYY SQCL |
| SEQ ID NO: 74 | MVDSFSIYKT ALLLSMLATS NAQQVGTYTA ETHPSLTWQT CSGSGSCTTT SGSVVIDANW RWVHEVGGYT NCYSGNTWDS SICSTDTTCA SECALEGATY ESTYGVTTSG |
| | SSLRLNFVTT ASQKNIGSRL YLLADDSTYE TFKLFNREFT FDVDVSNLPC GLNGALYFVS MDADGGVSRF PTNKAGAKYG TGYCDSQCPR DLKFIDGQAN IEGWEPSSTD |
| | VNAGTGNHGS CCPEMDIWEA NSISSAFTAH PCDSVQQTMC TGDTCGGTYS DTTDRYSGTC DPDGCDFNPY RFGNTNFYGP GKTVDNSKPF TVVTQFITHD GTDTGTLTEI |
| | RRLYVQNGVV IGNGPSTYTA ASGNSITESF CKAEKTLFGD TNVFETHGGL SAMGDALGDG MVLVLSLWDD HAADMLWLDS DYPTTSCASS PGVARGTCPT TTGNATYVEA |
| | NYPNSYVTYS NIKFGTLNST YSGTSSGGSS SSSTTLTTKA STSTTSSKTT TTTSKTSTTS SSSTNVAQLY GQCGGQGWTG PTTCASGTCTKQNDYYSQCL |
| SEQ ID NO: 75 | MYRILKSFIL LSLVNMSLSQ KIGKLTPEVH PPMTFQKCSE GGSCETIQGE VVVDANWRWV HSAQGQNCYT GNTWNPTICP DDETCAENCY LDGANYESVY GVTTSEDSVR |
| | LNFVTQSQGK NIGSRLFLMS NESNYQLFHV LGQEFTFDVD VSNLDCGLNG ALYLVSMDSD GGSARFPTNE AGAKYGTGYC DAQCPRDLKF ISGSANVDGW IPSTNNPNTG |
| | YGNLGSCCAE MDLWEANNMA TAVTPHPCDT SSQSVCKSDS CGGAASSNRY GGICDPDGCD YNPYRMGNTS FFGPNKMIDT NSVITVVTQF ITDDGSSDGK LTSIKRLYVQ |
| | DGNVISQSVS TIDGVEGNEV NEEFCTNQKK VFGDEDSFTK HGGLAKMGEA LKDGMVLVLS LWDDYQANML WLDSSYPTTS SPTDPGVARG SCPTTSGVPS KVEQNYPNAY |
| | VVYSNIKVGP IDSTYKK |
| SEQ ID NO: 76 | MISRVLAISS LLAAARAQQI GTNTAEVHPA LTSIVIDANW RWLHTTSGYT NCYTGNSWDA TLCPDAVTCA ANCALDGADY SGTYGITTSG NSLKLNFVTK GANTNVGSRT |
| | YLMAAGSKTQ YQLLKLLGQE FTFDVDVSNL PCGLNGALYF AEMDADGGVS RFPTNKAGAQ YGTGYCDAQC PQDIKFINGQ ANSVGWTPSS NDVNTGTGQY GSCCSEMDIW |
| | EANKISAAYT PHPCSVDGQT RCTGTDCGIG ARYSSLCDAD GCDFNSYRMG DTGFYGAGLT VDTSKVFTVV TQFITNDGTT SGTLSEIRRF YVQNGKVIPN SQSKVTGVSG |
| | NSITDSFCAA QKTAFGDTNE FATKGGLATM SKALAKGMVL VMSIWDDHSA NMLWLDAPYP ASKSPSAAGV SRGSCSASSG VPADVEANSP GASVTYSNIK WGPINSTYSA |
| | GTGSNTGSGS GSTTTLVSSV PSSTPTSTTG VPKYGQCGGS GYTGPTNCIG STCVSMGQYY SQCQ |
| SEQ ID NO: 77 | MYRQVATALS FASLVLGQQV GTLTAETHPS LPIEVCTAPG SCTKEDTTVV LDANWRWTHV TDGYTNCYTG NAWNETACPD GKTCAANCAI DGAEYEKTYG ITTPEEGALR |
| | LNFVTESNVG SRVYLMAGED KYRLFNLLNK EFTMDVDVSN LPCGLNGAVY FSEMDEDGGM SRFEGNKAGA KYGTGYCDSQ CPRDIKFING EANSEGWGGE DGNSGTGKYG |
| | TCCAEMDIWE ANLDATAYTP HPCKVTEQTR CEDDTECGAG DARYEGLCDR DGCDFNSFRL GNKEFYGPEK TVDTSKPFTL VTQFVTADGT DTGALQSIRR FYVQDGTVIP |
| | NSETVVEGVD PTNEITDDFC AQQKTAFGDN NHFKTIGGLP AMGKSLEKMV LVLSIWDDHA VYMNWLDSNY PTDADPTKPG VARGRCDPEA GVPETVEAAH PDAYVIYSNI |
| | KIGALNSTFA AA |
| SEQ ID NO: 78 | MSSFQVYRAA LLLSILATAN AQQVGTYTTE THPSLTWQTC TSDGSCTTND GEVVIDANWR WVHSTSSATN CYTGNEWDTS ICTDDVTCAA NCALDGATYE ATYGVTTSGS |
| | ELRLNFVTQG SSKNIGSRLY LMSDDSNYEL FKLLGQEFTF DVDVSNLPCG LNGALYFVAM DADGGTSEYS GNKAGAKYGT GYCDSQCPRD LKFINGEANC DGWEPSSNNV |
| | NTGVGDHGSC CAEMDVWEAN SISNAFTAHP CDSVSQTMCD GDSCGGTYSA SGDRYSGTCD PDGCDYNPYR LGNTDFYGPG LTVDTNSPFT VVTQFITDDG TSSGTLTEIK |
| | RLYVQNGEVI ANGASTYSSV NGSSITSAFC ESEKTLFGDE NVFDKHGGLE GMGEAMAKGM VLVLSLWDDY AADMLWLDSD YPVNSSASTP GVARGTCSTD SGVPATVEAE |
| | SPNAYVTYSN IKFGPIGSTY SSGSSSGSGS SSSSSSTTTK ATSTTLKTTS TTSSGSSSTS AAQAYGQCGG QGWTGPTTCV SGYTCTYENA YYSQCL |
| SEQ ID NO: 79 | MYRAIATASA LLATARAQQV CTLNTENKPA LTWAKCTSSG CSNVRGSVVV DANWRWAHST SSSTNCYTGN TWDKTLCPDG KTCADKCCLD GADYSGTYGV TSSGNQLNLK |
| | FVTVGPYSTN VGSRLYLMED ENNYQMFDLL GNEFTFDVDV NNIGCGLNGA LYFVSMDKDG GKSRFSTNKA GAKYGTGYCD AQCPRDVKFI NGVANSDEWK PSDSDKNAGV |
| | GKYGTCCPEM DIWEANKIST AYTPHPCKSL TQQSCEGDAC GGTYSATRYA GTCDPDGCDF NPYRQGNKTF YGPGSGFNVD TTKKVTVVTQ FIKGSDGKLS EIKRLYVQNG |
| | KVIGNPQSEI ANNPGSSVTD SFCKAQKVAF NDPDDFNKKG GWSGMSDALA KPMVLVMSLW HDHYANMLWL DSTYPKGSKT PGSARGSCPE DSGDPDTLEK EVPNSGVSFS |
| | NIKFGPIGST YTGTGGSNPD PEEPEEPEEP VGTVPQYGQC GGINYSGPTA CVSPYKCNKI NDFYSQCQ |
| SEQ ID NO: 80 | EQAGTATAEN HPPLTWQECT APGSCTTQNG AVVLDANWRW VHDVNGYTNC YTGNTWDPTY CPDDETCAQN CALDGADYEG TYGVTSSGSS LKLNFVTGSN VGSRLYLLQD |
| | DSTYQIFKLL NREFSFDVDV SNLPCGLNGA LYFVAMDADG GVSKYPNNKA GAKYGTGYCD SQCPRDLKFI DGEANVEGWQ PSSNNANTGI GDHGSCCAEM DVWEANSISN |
| | AVTPHPCDTP GQTMCSGDDC GGTYSNDRYA GTCDPDGCDF NPYRMGNTSF YGPGKIIDTT KPFTVVTQFL TDDGTDTGTL SEIKRFYIQN SNVIPQPNSD ISGVTGNSIT |
| | TEFCTAQKQA FGDTDDFSQH GGLAKMGAAM QQGMVLVMSL WDDYAAQMLW LDSDYPTDAD PTTPGIARGT CPTDSGVPSD VESQSPNSYV TYSNIKFGPI NSTFTAS |
| SEQ ID NO: 81 | MFPTLALVSL SFLAIAYGQQ VGTLTAETHP KLSVSQCTAG GSCTTVQRSV VLDSNWRWLH DVGGSTNCYT GNTWDDSLCP DPTTCAANCA LDGADYSGTY GITTSGNALS |
| | LKFVTQGPYS TNIGSRVYLL SEDDSTYEMF NLKNQEFTFD VDMSALPCGL NGALYFVEMD KDGGSGRFPT NKAGSKYGTG YCDTQCPHDI KFINGEANVL DWAGSSNDPN |
| | AGTGHYGTCC NEMDIWEANS MGAAVTPHVC TVQGQTRCEG TDCGDGDERY DGICDKDGCD FNSWRMGDQT FLGPGKTVDT SSKFTVVTQF ITADNTTSGD LSEIRRLYVQ |
| | NGKVIANSKT QIAGMDAYDS ITDDFCNAQK TTFGDTNTFE QMGGLATMGD AFETGMVLVM SIWDDHEAKM LWLDSDYPTD ADASAPGVSR GPCPTTSGDP TDVESQSPGA |
| | TVIFSNIKTG PIGSTFTS |
| SEQ ID NO: 82 | MLSASKAAAI LAFCAHTASA WVVGDQQTET HPKLNWQRCT GKGRSSCTNV NGEVVIDANW RWLAHRSGYT NCYTGSEWNQ SACPNNEACT KNCAIEGSDY AGTYGITTSG |
| | NQMNIKFITK RPYSTNIGAR TYLMKDEQNY EMFQLIGNEF TFDVDLSQRC GMNGALYFVS MPQKGQGAPG AKYGTGYCDA QCARDLKFVR GSANAEGWTK SASDPNSGVG |
| | KKGACCAQMD VWEANSAATA LTPHSCQPAG YSVCEDTNCG GTYSEDRYAG TCDANGCDFN PFRVGVKDFY GKGKTVDTTK KMTVVTQFVG SGNQLSEIKR FYVQDGKVIA |
| | NPEPTIPGME WCNTQKKVFQ EEAYPFNEFG GMASMSEGMS QGMVLVMSLW DDHYANMLWL DSNWPREADP AKPGVARRDC PTSGGKPSEV EAANPNAQVM FSNIKFGPIG |
| | STFAHAA |
| SEQ ID NO: 83 | MFRTATLLAF TMAAMVFGQQ VGTNTARSHP ALTSQKCTKS GGCSNLNTKI VLDANWRWLH STSGYTNCYT GNQWDATLCP DGKTCAANCA LDGADYTGTY GITASGSSLK |
| | LQFVTGSNVG SRVYLMADDT HYQMFQLLNQ EFTFDVDMSN LPCGLNGALY LSAMDADGGM AKYPTNKAGA KYGTGYCDSQ CPRDIKFING EANVEGWNAT SANAGTGNYG |
| | TCCTEMDIWE ANNDAAAYTP HPCTTNAQTR CSGSDCTRDT GLCDADGCDF NSFRMGDQTF LGKGLTVDTS KPFTVVTQFI TNDGTSAGTL TEIRRLYVQN GKVIQNSSVK |
| | IPGIDPVNSI TDNFCSQQKT AFGDTNYFAQ HGGLKQVGEA LRTGMVLALS IWDDYAANML WLDSNYPTNK DPSTPGVARG TCATTSGVPA QIEAQSPNAY VVFSNIKFGD |
| | LNTTYTGTVS SSSVSSSHSS TSTSSSHSSS STPPTQPTGV TVPQWGQCGG IGYTGSTTCA SPYTCHVLNP YYSQCY |
| SEQ ID NO: 84 | MYQRALLFSA LMAGVSAQQV GTQKPETHPP LAWKECTSSG CTSKDGSVVI DANWRWVHSV DGYKNCYTGN EWDSTLCPDD ATCATNCAVD GADYAGTYGA TTEGDSLSIN |
| | FVTGSNIGSR FYLMEDENKY QMFKLLNKEF TFDVDVSTLP CGLNGALYFV SMDADGGMSK YETNKAGAKY GTGYCDSQCP RDLKFINGKG NVEGWKPSAN DKNAGVGPHG |
| | SCCAEMDIWE ANSISTALTP HPCDTNGQTI CEGDSCGGTY STTRYAGTCD PDGCDFNPFR MGNESFYGPG KMVDTKSKMT VVTQFITSDG TDTGSLKEIK RVYVQNGKVI |
| | ANSASDVSGI TGNSITSDFC TAQKKTFGDE DVFNKHGGLS GMGDALGEGM VLVMSLWDDH NSNMLWLDGE KYPTDAAASK AGVSRGTCST DSGKPSTVES ESGSAKVVFS |
| | NIKVGSIGST FSA |
| SEQ ID NO: 85 | MTSKIALASL FAAAYGQQIG TYTTETHPSL TWQSCTAKGS CTTQSGSIVL DGNWRWTHST TSSTNCYTGN TWDATLCPDD ATCAQNCALD GADYSGTYGI TTSGDSLRLN |
| | FVTQTANKNV GSRVYLLADN THYKTFNLLN QEFTFDVDVS NLPCGLNGAV YFANLPADGG ISSTNKAGAQ YGTGYCDSQC PRDGKFINGK ANVDGWVPSS NNPNTGVGNY |
| | GSCCAEMDIW EANSISTAVT PHSCDTVTQT VCTGDNCGGT YSTTRYAGTC DPDGCDFNPY RQGNESFYGP GKTVDTNSVF TIVTQFLTTD GTSSGTLNEI KRFYVQNGKV |
| | IPNSESTISG VTGNSITTPF CTAQKTAFGD PTSFSDHGGL ASMSAAFEAG MVLVLSLWDD YYANMLWLDS TYPTTKTGAG GPRGTCSTSS GVPASVEASS PNAYVVYSNI |
| | KVGAINSTFG |
| SEQ ID NO: 86 | MYTKFAALAA LVATVRGQAA CSLTAETHPS LQWQKCTAPG SCTTVSGQVT IDANWRWLHQ TNSSTNCYTG NEWDTSICSS DTDCATKCCL DGADYTGTYG VTASGNSLNL |
| | KFVTQGPYSK NIGSRMYLME SESKYQGFTL LGQEFTFDVD VSNLGCGLNG ALYFVSMDLD GGVSKYTTNK AGAKYGTGYC DSQCPRDLKF INGQANIDGW QPSSNDANAG |
| | LGNHGSCCSE MDIWEANKVS AAYTPHPCTT IGQTMCTGDD CGGTYSSDRY AGICDPDGCD FNSYRMGDTS FYGPGKTVDT GSKFTVVTQF LTGSDGNLSE IKRFYVQNGK |
| | VIPNSESKIA GVSGNSITTD FCTAQKTAFG DTNVFEERGG LAQMGKALAE PMVLVLSVWD DHAVNMLWLD STYPTDSTKP GAARGDCPIT SGVPADVESQ APNSNVIYSN |
| | IRFGPINSTY TGTPSGGNPP GGGTTTTTTT TTSKPSGPTT TTNPSGPQQT HWGQCGGQGW TGPTVCQSPY TCKYSNDWYS QCL |
| SEQ ID NO: 87 | MYQRALLFSA LLSVSRAQQA GTAQEEVHPS LTWQRCEASG SCTEVAGSVV LDSNWRWTHS VDGYTNCYTG NEWDATLCPD NESCAQNCAV DGADYEATYG ITSNGDSLTL |
| | KFVTGSNVGS RVYLMEDDET YQMFDLLNNE FTFDVDVSNF PCGLNGALYF TSMDADGGLS KYEGNTAGAK YGTGYCDSQC PRDIKFINGL GNVEGWEPSD SDANAGVGGM |
| | GTCCPEMDIW EANSISTAYT PHPCDSVEQT MCEGDSCGGT YSDDRYGGTC DPDGCDFNSY RMGNTRFYGP GAIIDTSSKF TVVTQFIADG GSLSEIKRFY VQNGEVIPNS |
| | ESNISGVEGN SITSEFCTAQ KTAFGDEDIF AQHGGLSAMG DAASAMVLIL SIWDDHHSSM MWLDSSYPTD ADPSQPGVAR GTCEQGAGDP DVVESEHADA SVTFSNIKFG |
| | PIGSTF |
| SEQ ID NO: 88 | MMMKQYLQYL AAGSLMTGLV AGQGVGTQQT ETHPRITWKR CTGKANCTTV QAEVVIDSNW RWIHTSGGTN CYDGNAWNTA ACSTATDCAS KCLMEGAGNY QQTYGASTSG |
| | DSLTLKFVTK HEYGTNVGSR FYLMNGASKY QMFTLMNNEF TFDVDLSTVE CGLNSALYFV AMEEDGGMRS YPTNKAGAKY GTGYCDAQCA RDLKFVGGKA NIEGWRESSN |
| | DENAGVGPYG GCCAEIDVWE SNAHAYAFTP HACENNNYHV CERDTCGGTY SEDRFAGGCD ANGCDYNPYR MGNPDFYGKG KTVDTTKKFT VVTRFQDDNL EQFFVQNGQK |
| | ILAPAPTFDG IPASPNLTPE FCSTQFDVFT DRNRFREVGD FPQLNAALRI PMVLVMSIWA DHYANMLWLD SVYPPEKEGE PGAARGPCAQ DSGVPSEVKA NYPNAKVVWS |
| | NIRFGPIGST VNV |
| SEQ ID NO: 89 | MYQRALLFSF FLAAARAQQA GTVTAENHPS LTWQQCSSGG SCTTQNGKVV IDANWRWVHT TSGYTNCYTG NTWDTSICPD DVTCAQNCAL DGADYSGTYG VTTSGNALRL |
| | NFVTQSSGKN IGSRLYLLQD DTTYQIFKLL GQEFTFDVDV SNLPCGLNGA LYFVAMDADG GLSKYPGNKA GAKYGTGYCD SQCPRDLKFI NGQANVEGWQ PSANDPNAGV |
| | GNHGSCCAEM DVWEANSIST AVTPHPCDTP GQTMCQGDDC GGTYSSTRYA GTCDPDGCDF NPYRQGNHSF YGPGKIVDTS SKFTVVTQFI TDDGTPSGTL TEIKRFYVQN |
| | GKVIPQSEST ISGVTGNSIT TEYCTAQKAA FGDNTGFFTH GGLQKISQAL AQGMVLVMSL WDDHAANMLW LDSTYPTDAD PDTPGVARGT CPTTSGVPAD VESQNPNSYV |
| | IYSNIKVGPI NSTFTAN |
| SEQ ID NO: 90 | MFAIVLLGLT RSLGTGTNQA ENHPSLSWQN CRSGGSCTQT SGSVVLDSNW RWTHDSSLTN CYDGNEWSSS LCPDPKTCSD NCLIDGADYS GTYGITSSGN SLKLVFVTNG |
| | PYSTNIGSRV YLLKDESHYQ IFDLKNKEFT FTVDDSNLDC GLNGALYFVS MDEDGGTSRF SSNKAGAKYG TGYCDAQCPH DIKFINGEAN VENWKPQTND ENAGNGRYGA |
| | CCTEMDIWEA NKYATAYTPH ICTVNGEYRC DGSECGDTDS GNRYGGVCDK DGCDFNSYRM GNTSFWGPGL IIDTGKPVTV VTQFVTKDGT DNGQLSEIRR KYVQGGKVIE |
| | NTVVNIAGMS SGNSITDDFC NEQKSAFGDT NDFEKKGGLS GLGKAFDYGM VLVLSLWDDH QVNMLWLDSI YPTDQPASQP GVKRGPCATS SGAPSDVESQ HPDSSVTFSD |
| | IRFGPIDSTY |
| SEQ ID NO: 91 | MHQRALLFSA LVGAVRAQQA GTLTEEVHPP LTWQKCTADG SCTEQSGSVV IDSNWRWLHS TNGSTNCYTG NTWDESLCPD NEACAANCAL DGADYESTYG ITTSGDALTL |
| | TFVTGENVGS RVYLMAEDDE SYQTFDLVGN EFTFDVDVSN LPCGLNGALY FTSMDADGGV SKYPANKAGA KYGTGYCDSQ CPRDLKFING MANVEGWTPS DNDKNAGVGG |
| | HGSCCPELDI WEANSISSAF TPHPCDDLGQ TMCSGDDCGG TYSETRYAGT CDPDGCDFNA YRMGNTSYYG PDKIVDTNSV MTVVTQFIGD GGSLSEIKRL YVQNGKVIAN |
| | AQSNVDGVTG NSITSDFCTA QKTAFGDQDI FSKHGGLSGM GDAMSAMVLI LSIWDDHNSS MMWLDSTYPE DADASEPGVA RGTCEHGVGD PETVESQHPG ATVTFSKIKF |
| | GPIGSTYSSN STA |
| SEQ ID NO: 92 | MFRAAALLAF TCLAMVSGQQ AGTNTAENHP QLQSQQCTTS GGCKPLSTKV VLDSNWRWVH STSGYTNCYT GNEWDTSLCP DGKTCAANCA LDGADYSGTY GITSTGTALT |
| | LKFVTGSNVG SRVYLMADDT HYQLLKLLNQ EFTFDVDMSN LPCGLNGALY LSAMDADGGM SKYPGNKAGA KYGTGYCDSQ CPKDIKFING EANVGNWTET GSNTGTGSYG |
| | TCCSEMDIWE ANNDAAAFTP HPCTTTGQTR CSGDDCARNT GLCDGDGCDF NSFRMGDKTF LGKGMTVDTS KPFTVVTQFL TNDNTSTGTL SEIRRIYIQN GKVIQNSVAN |
| | IPGVDPVNSI TDNFCAQQKT AFGDTNWFAQ KGGLKQMGEA LGNGMVLALS IWDDHAANML WLDSDYPTDK DPSAPGVARG TCATTSGVPS DVESQVPNSQ VVFSNIKFGD |
| | IGSTFSGTSS PNPPGGSTTS SPVTTSPTPP PTGPTVPQWG QCGGIGYSGS TTCASPYTCH VLNPCESILS LQRSSNADQY LQTTRSATKR RLDTALQPRK |
| SEQ ID NO: 93 | MRTALALILA LAAFSAVSAQ QAGTITAETH PTLTIQQCTQ SGGCAPLTTK VVLDVNWRWI HSTTGYTNCY SGNTWDAILC PDPVTCAANC ALDGADYTGT FGILPSGTSV |
| | TLRPVDGLGL RLFLLADDSH YQMFQLLNKE FTFDVEMPNM RCGSSGAIHL TAMDADGGLA KYPGNQAGAK YGTGFCSAQC PKGVKFINGQ ANVEGWLGTT ATTGTGFFGS |
| | CCTDIALWEA NDNSASFAPH PCTTNSQTRC SGSDCTADSG LCDADGCNFN SFRMGNTTFF GAGMSVDTTK LFTVVTQFIT SDNTSMGALV EIHRLYIQNG QVIQNSVVNI |
| | PGINPATSIT DDLCAQENAA FGGTSSFAQH GGLAQVGEAL RSGMVLALSI VNSAADTLWL DSNYPADADP SAPGVARGTC PQDSASIPEA PTPSVVFSNI KLGDIGTTFG |
| | AGSALFSGRS PPGPVPGSAP ASSATATAPP FGSQCGGLGY AGPTGVCPSP YTCQALNIYY SQCI |
| SEQ ID NO: 94 | MYQRALLFSF FLAAARAHEA GTVTAENHPS LTWQQCSSGG SCTTQNGKVV IDANWRWVHT TSGYTNCYTG NTWDTSICPD DVTCAQNCAL DGADYSGTYG VTTSGNALRL |
| | NFVTQSSGKN IGSRLYLLQD DTTYQIFKLL GQEFTFDVDV SNLPCGLNGA LYFVAMDADG NLSKYPGNKA GAKYGTGYCD SQCPRDLKFI NGQANVEGWQ PSANDPNAGV |
| | GNHGSSCAEM DVWEANSIST AVTPHPCDTP GQTMCQGDDC GGTYSSTRYA GTCDTDGCDF NPYQPGNHSF YGPGKIVDTS SKFTVVTQFI TDDGTPSGTL TEIKRFYVQN |
| | GKVIPQSEST ISGVTGNSIT TEYCTAQKAA FDNTGFFTHG GLQKISQALA QGMVLVMSLW DDHAANMLWL DSTYPTDADP DTPGVARGTC PTTSGVPADV ESQNPNSYVI |
| | YSNIKVGPIN STFTAN |
| SEQ ID NO: 95 | MHKRAATLSA LVVAAAGFAR GQGVGTQQTE THPKLTFQKC SAAGSCTTQN GEVVIDANWR WVHDKNGYTN CYTGNEWNTT ICADAASCAS NCVVDGADYQ GTYGASTSGN |
| | ALTLKFVTKG SYATNIGSRM YLMASPTKYA MFTLLGHEFA FDVDLSKLPC GLNGAVYFVS MDEDGGTSKY PSNKAGAKYG TGYCDSQCPR DLKFIDGKAN SASWQPSSND |
| | QNAGVGGMGS CCAEMDIWEA NSVSAAYTPH PCQNYQQHSC SGDDCGGTYS ATRFAGDCDP DGCDWNAYRM GVHDFYGNGK TVDTGKKFSI VTQFKGSGST LTEIKQFYVQ |
| | DGRKIENPNA TWPGLEPFNS ITPDFCKAQK QVFGDPDRFN DMGGFTNMAK ALANPMVLVL SLWDDHYSNM LWLDSTYPTD ADPSAPGKGR GTCDTSSGVP SDVESKNGDA |
| | TVIYSNIKFG PLDSTYTAS |
| SEQ ID NO: 96 | MRASLLAFSL NSAAGQQAGT LQTKNHPSLT SQKCRQGGCP QVNTTIVLDA NWRWTHSTSG STNCYTGNTW QATLCPDGKT CAANCALDGA DYTGTYGVTT SGNSLTLQFV |
| | TQSNVGARLG YLMADDTTYQ MFNLLNQEFW FDVDMSNLPC GLNGALYFSA MARTAAWMPM VVCASTPLIS TRRSTARLLR LPVPPRSRYG RGICDSQCPR DIKFINGEAN |
| | VQGWQPSPND TNAGTGNYGA CCNKMDVWEA NSISTAYTPH PCTQRGLVRC SGTACGGGSN RYGSICDHDG LGFQNLFGMG RTRVRARVGR VKQFNRSSRV VEPISWTKQT |
| | TLHLGNLPWK SADCNVQNGR VIQNSKVNIP GMPSTMDSVT TEFCNAQKTA FNDTFSFQQK GGMANMSEAL RRGMVLVLSI WDDHAANMLW LDSITSAAAC RSTPSEVHAT |
| | PLRESQIRSS HSRQTRYVTF TNIKFGPFNS TGTTYTTGSV PTTSTSTGTT GSSTPPQPTG VTVPQGQCGG IGYTGPTTCA SPTTCHVLNP YYSQCY |
| SEQ ID NO: 97 | MKQYLQYLAA ALPLMSLVSA QGVGTSTSET HPKITWKKCS SGGSCSTVNA EVVIDANWRW LHNADSKNCY DGNEWTDACT SSDDCTSKCV LEGAEYGKTY GASTSGDSLS |
| | LKFLTKHEYG TNIGSRFYLM NGASKYQMFT LMNNEFAFDV DLSTVECGLN SALYFVAMEE DGGMASYSTN KAGAKYGTGY CDAQCARDLK FVGGKANYDG WTPSSNDANA |
| | GVGALGGCCA EIDVWESNAH AFAFTPHACE NNNYHVCEDT TCGGTYSEDR FAGDCDANGC DYNPYRVGNT DFYGKGMTVD TSKKFTVVSQ FQENKLTQFF VQNGKKIEIP |
| | GPKHEGLPTE SSDITPELCS AMPEVFGDRD RFAEVGGFDA LNKALAVPMV LVMSIWDDHY ANMLWLDSSY PPEKAGTPGG DRGPCAQDSG VPSEVESQYP DATVVWSNIR |
| | FGPIGSTVQV |
| SEQ ID NO: 98 | MFPKASLIAL SFIAAVYGQQ VGTQMAEVHP KLPSQLCTKS GCTNQNTAVV LDANWRWLHT TSGYTNCYTG NSWDATLCPD ATTCAQNCAV DGADYSGTYG ITTSGNALTL |
| | KFKTGTNVGS RVYLMQTDTA YQMFQLLNQE FTFDVDMSNL PCGLNGALYL SQMDQDGGLS KFPTNKAGAK YGTGYCDSQC PHDIKFINGM ANVAGWAGSA SDPNAGSGTL |
| | GTCCSEMDIW EANNDAAAFT PHPCSVDGQT QCSGTQCGDD DERYSGLCDK DGCDFNSFRM GDKSFLGKGM TVDTSRKFTV VTQFVTTDGT TNGDLHEIRR LYVQDGKVIQ |
| | NSVVSIPGID AVDSITDNFC AQQKSVFGDT NYFATLGGLK KMGAALKSGM VLAMSVWDDH AASMQWLDSN YPADGDATKP GVARGTCSAD SGLPTNVESQ SASASVTFSN |
| | IKWGDINTTF TGTGSTSPSS PAGPVSSSTS VASQPTQPAQ GTVAQWGQCG GTGFTGPTVC ASPFTCHVVN PYYSQCY |
| SEQ ID NO: 99 | MFRTAALLSF AYLAVVYGQQ AGTSTAETHP PLTWEQCTSG GSCTTQSSSV VLDSNWRWTH VVGGYTNCYT GNEWNTTVCP DGTTCAANCA LDGADYEGTY GISTSGNALT |
| | LKFVTASAQT NVGSRVYLMA PGSETEYQMF NPLNQEFTFD VDVSALPCGL NGALYFSEMD ADGGLSEYPT NKAGAKYGTG YCDSQCPRDI KFIEGKANVE GWTPSSTSPN |
| | AGTGGTGICC NEMDIWEANS ISEALTPHPC TAQGGTACTG DSCSSPNSTA GICDQAGCDF NSFRMGDTSF YGPGLTVDTT SKITVVTQFI TSDNTTTGDL TAIRRIYVQN |
| | GQVIQNSMSN IAGVTPTNEI TTDFCDQQKT AFGDTNTFSE KGGLTGMGAA FSRGMVLVLS IWDDDAAEML WLDSTYPVGK TGPGAARGTC ATTSGQPDQV ETQSPNAQVV |
| | FSNIKFGAIG STFSSTGTGT GTGTGTGTGT GTTTSSAPAA TQTKYGQCGG QGWTGATVCA SGSTCTSSGP YYSQCL |
| SEQ ID NO: 100 | MFRTAALTAF TFAAVVLGQQ VGTLTTENHP ALSIQQCTAT GCTTQQKSVV LDSNWRWTHS TAGATNCYTG NAWDPALCPD PATCATNCAI DGADYSGTYG ITTSGNALTL |
| | RFVTNGQYSQ NIGSRVYLLD DADHYKLFDL KNQEFTFDVD MSGLPCGLNG ALYFSEMAAD GGKAAHAGNN AGAKYGTGYC DAQCPHDIKW INGEANVLDW SASATDDNAG |
| | NGRYGACCAE MDIWEANSEA TAYTPHVCRD EGLYRCSGTE CGDGNNRYGG VCDKDGCDFN SYRMGDKNFL GRGKTIDTTK KVTVVTQFIT DNNTPTGNLV EIRRVYVQNG |
| | VVYQNSFSTF PSLSQYNSIS DEFCVAQKTL FGDNQYYNTH GGTTKMGDAF DNGMVLIMSL WSDHAAHMLW LDSDYPLDKS PSEPGVSRGA CPTSSGDPDD VVANHPNASV |
| | TFSNIKYGPI GSTFGGSTPP VSSGGSSVPP VTSTTSSGTT TPTGPTGTVP KWGQCGGIGY SGPTACVAGS TCTYSNDWYS QCL |
| SEQ ID NO: 101 | MYRAIATASA LIAAVRAQQV CSLTPETKPA LSWSKCTSSG CSNVQGSVTI DANWRWTHQL SGSTNCYTGN KWDTSICTSG KVCAEKCCID GAEYASTYGI TSSGNQLSLS |
| | FVTKGTYGTN IGSRTYLMED ENTYQMFQLL GNEFTFDVDV SNIGCGLNGA LYFVSMDADG GKAKYPGNKA GAKYGTGYCD AQCPRDVKFI NGQANSDGWQ PSKSDVNGGI |
| | GNLGTCCPEM DIWEANSIST AHTPHPCTKL TQHSCTGDSC GGTYSEDRYG GTCDADGCDF NAYRQGNKTF YGPGSGFNVD TTKKVTVVTQ FHKGSNGRLS EITRLYVQNG |
| | KVIANSESKI AGVPGSSLTP EFCTAQKKVF GDIDDFEKKG AWGGMSDALE APMVLVMSLW HDHHSNMLWL DSTYPTDSTK LGAQRGSCST SSGVPADLEK NVPNSKVAFS |
| | NIKFGPIGST YKEGQPEPTN PTNPNPTTPG GTVDQWGQCG GTNYSGPTAC KSPFTCKKIN DFYSQCQ |
| SEQ ID NO: 102 | MFRTATLLAF TMAAMVFGQQ VGTNTAENHR TLTSQKCTKS GGCSNLNTKI VLDANWRWLH STSGYTNCYT GNQWDATLCP DGKTCAANCA LDGADYTGTY GITASGSSLK |
| | LQFVTGSNVG SRVYLMADDT HYQMFQLLNQ EFTFDVDMSN LPCGLNGALY LSAMDADGGM AKYPTNKAGA KYGTGYCDSQ CPRDIKFING EANVEGWNAT SANAGTGNYG |
| | TCCTEMDIWE ANNDAAAYTP HPCTTNAQTR CSGSDCTRDT GLCDADGCDF NSFRMGDQTF LGKGLTVDTS KPFTVVTQFI TNDGTSAGTL TEIRRLYVQN GKVIQNSSVK |
| | IPGIDLVNSI TDNFCSQQKT AFGDTNYFAQ HGGLKQVGEA LRTGMVLALS IWDDYAANML WLDSNYPTNK DPSTPGVARG TCATTSGVPA QIEAQSPNAY VVFSNIKFGD |
| | LNTTYTGTVS SSSVSSSHSS TSTSSSHSSS STPPTQPTGV TVPQWGQCGG IGYTGSTTCA SPYTCHVLNP YYSQCY |
| SEQ ID NO: 103 | MYQTSLLASL SFLLATSQAQ QVGTQTAETH PKLTTQKCTT AGGCTDQSTS IVLDANWRWL HTVDGYTNCY TGQEWDTSIC TDGKTCAEKC ALDGADYEST YGISTSGNAL |
| | TMNFVTKSSQ TNIGGRVYLL AADSDDTYEL FKLKNQEFTF DVDVSNLPCG LNGALYFSEM DSDGGLSKYT TNKAGAKYGT GYCDTQCPHD IKFINGEANV QNWTASSTDK |
| | NAGTGHYGSC CNEMDIWEAN SQATAFTPHV CEAKVEGQYR CEGTECGDGD NRYGGVCDKD GCDFNSYRMG NETFYGSNGS TIDTTKKFTV VTQFITADNT ATGALTEIRR |
| | KYVQNDVVIE NSYADYETLS KFNSITDDFC AAQKTLSGDT NDFKTKGGIA RMGESFERGM VLVMSVWDDH AANALWLDSS YPTDADASKP GVKRGPCSTS SGVPSDVEAN |
| | DADSSVIYSN IRYGDIGSTF NKTA |
| SEQ ID NO: 104 | MFSKVALTAL CFLAVAQAQQ VGREVAENHP RLPWQRCTRN GGCQTVSNGQ VVLDANWRWL HVTDGYTNCY TGNAWNSSVC SDGATCAQRC ALEGANYQQT YGITTSGDAL |
| | TIKFLTRSEQ TNIGARVYLM ENEDRYQMFN LLNKEFTFDV DVSKVPCGIN GALYFIQMDA DGGLSSQPNN RAGAKYGTGY CDSQCPRDIK FINGEANSVG WEPSETDPNA |
| | GKGQYGICCA EMDIWEANSI SNAYTPHPCQ TVNDGGYQRC QGRDCNQPRY EGLCDPDGCD YNPFRMGNKD FYGPGKTVDT NRKMTVVTQF ITHDNTDTGT LVDIRRLYVQ |
| | DGRVIANPPT NFPGLMPAHD SITQEFCDDA KRAFEDNDSF GRNGGLAHMG RSLAKGHVLA LSIWNDHTAH MLWLDSNYPT DADPNKPGIA RGTCPTTGGS PRDTEQNHPD |
| | AQVIFSNIKF GDIGSTFSGN |
| SEQ ID NO: 105 | MYRKLAVISA FLAAARAQQV CTQQAETHPP LTWQKCTASG CTPQQGSVVL DANWRWTHDT KSTTNCYDGN TWSSTLCPDD ATCAKNCCLD GANYSGTYGV TTSGDALTLQ |
| | FVTASNVGSR LYLMANDSTY QEFTLSGNEF SFDVDVSQLP CGLNGALYFV SMDADGGQSK YPGNAAGAKY GTGYCDSQCP RDLKFINGQA NVEGWEPSSN NANTGVGGHG |
| | SCCSEMDIWE ANSISEALTP HPCETVGQTM CSGDSCGGTY SNDRYGGTCD PDGCDWNPYR LGNTSFYGPG SSFALDTTKK LTVVTQFATD GSISRYYVQN GVKFQQPNAQ |
| | VGSYSGNTIN TDYCAAEQTA FGGTSFTDKG GLAQINKAFQ GGMVLVMSLW DDYAVNMLWL DSTYPTNATA STPGAKRGSC STSSGVPAQV EAQSPNSKVI YSNIRFGPIG |
| | STGGNTGSNP PGTSTTRAPP SSTGSSPTAT QTHYGQCGGT GWTGPTRCAS GYTCQVLNPF YSQCL |
| SEQ ID NO: 106 | MRASLLAFSL AAAVAGGQQA GTLTAKRHPS LTWQKCTRGG CPTLNTTMVL DANWRWTHAT SGSTKCYTGN KWQATLCPDG KSCAANCALD GADYTGTYGI TGSGWSLTLQ |
| | FVTDNVGARA YLMADDTQYQ MLELLNQELW FDVDMSNIPC GLNGALYLSA MDADGGMRKY PTNKAGAKYA TGYCDAQCPR DLKYINGIAN VEGWTPSTND ANGIGDHGSC |
| | CSEMDIWEAN KVSTAFTPHP CTTIEQHMCE GDSCGGTYSD DRYGVLCDAD GCDFNSYRMG NTTFYGEGKT VDTSSKFTVV TQFIKDSAGD LAEIKAFYVQ NGKVIENSQS |
| | NVDGVSGNSI TQSFCKSQKT AFGDIDDFNK KGGLKQMGKA LAQAMVLVMS IWDDHAANML WLDSTYPVPK VPGAYRGSGP TTSGVPAEVD ANAPNSKVAF SNIKFGHLGI |
| | SPFSGGSSGT PPSNPSSSAS PTSSTAKPSS TSTASNPSGT GAAHWAQCGG IGFSGPTTCP EPYTCAKDHD IYSQCV |
| SEQ ID NO: 107 | MLASTFSYRM YKTALILAAL LGSGQAQQVG TSQAEVHPSM TWQSCTAGGS CTTNNGKVVI DANWRWVHKV GDYTNCYTGN TWDKTLCPDD ATCASNCALE GANYQSTYGA |
| | TTSGDSLRLN FVTTSQQKNI GSRLYMMKDD TTYEMFKLLN QEFTFDVDVS NLPCGLNGAL YFVAMDADGG MSKYPTNKAG AKYGTGYCDS QCPRDLKFIN GQANVEGWQP |
| | SSNDANAGTG NHGSCCAEMD IWEANSISTA FTPHPCDTPG QVMCTGDACG GTYSSDRYGG TCDPDGCDFN SFRQGNKTFY GPGMTVDTKS KFTVVTQFIT DDGTASGTLK |
| | EIKRFYVQNG KVIPNSESTW SGVGGNSITN DYCTAQKSLF KDQNVFAKHG GMEGMGAALA QGMVLVMSLW DDHAANMLWL DSNYPTTASS STPGVARGTC DISSGVPADV |
| | EANHPDASVV YSNIKVGPIG STFNSGGSNP GGGTTTTAKP TTTTTTAGSP GGTGVAQHYG QCGGNGWQGP TTCASPYTCQ KLNDFYSQCL |
| SEQ ID NO: 108 | MQIKQYLQYL AAALPLVNMA AAQRAGTQQT ETHPRLSWKR CSSGGNCQTV NAEIVIDANW RWLHDSNYQN CYDGNRWTSA CSSATDCAQK CYLEGANYGS TYGVSTSGDA |
| | LTLKFVTKHE YGTNIGSRVY LMNGSDKYQM FTLMNNEFAF DVDLSKVECG LNSALYFVAM EEDGGMRSYS SNKAGAKYGT GYCDAQCARD LKFVGGKANI EGWRPSTNDA |
| | NAGVGPYGAC CAEIDVWESN AYAFAFTPHG CLNNNYHVCE TSNCGGTYSE DRFGGLCDAN GCDYNPYRMG NKDFYGKGKT VDTSRKFTVV TRFEENKLTQ FFIQDGRKID |
| | IPPPTWPGLP NSSAITPELC TNLSKVFDDR DRYEETGGFR TINEALRIPM VLVMSIWDGH YASMLWLDSV YPPEKAGQPG AERGPCAPTS GVPAEVEAQF PNAQVIWSNI |
| | RFGPIGSTYQ V |
| SEQ ID NO: 109 | MTSRIALVSL FAAVYGQQVG TYQTETHPSL TWQSCTAKGS CTTNTGSIVL DGNWRWTHGV GTSTNCYTGN TWDATLCPDD ATCAQNCALE GADYSGTYGI TTSGNSLRLN |
| | FVTQSANKNI GSRVYLMADT THYKTFNLLN QEFTFDVDVS NLPCGLNGAV YFANLPADGG ISSTNTAGAE YGTGYCDSQC PRDMKFIKGQ ANVDGWVPSS NNANTGVGNH |
| | GSCCAEMDIW EANSISTAVT PHSCDTVTQT VCTGDDCGGT YSSSRYAGTC DPDGCDFNSY RMGDETFYGP GKTVDTNSVF TVVTQFLTTD GTASGTLNEI KRFYVQDGKV |
| | IPNSYSTISG VSGNSITTPF CDAQKTAFGD PTSFSDHGGL ASMSAAFEAG MVLVLSLWDD YYANMLWLDS TYPVGKTSAG GPRGTCDTSS GVPASVEASS PNAYVVYSNI |
| | KVGAINSTYG |
| SEQ ID NO: 110 | MFVFVLLWLT QSLGTGTNQA ENHPSLSWQN CRSGGSCTQT SGSVVLDSNW RWTHDSSLTN CYDGNEWSSS LCPDPKTCSD NCLIDGADYS GTYGITSSGN SLKLVFVTNG |
| | PYSTNIGSRV YLLKDESHYQ IFDLKNKEFT FTVDDSNLDC GLNGALYFVS MDEDGGTSRF SSNKAGAKYG TGYCDAQCPH DIKFINGEAN VENWKPQTND ENAGNGRYGA |
| | CCTEMDIWEA NKYATAYTPH ICTVNGEYRC DGSECGDTDS GNRYGGVCDK DGCDFNSYRM GNTSFWGPGL IIDTGKPVTV VTQFVTKDGT DNGQLSEIRR KYVQGGKVIE |
| | NTVVNIAGMS SGNSITDDFC NEQKSAFGDT NDFEKKGGLS GLGKAFDYGM VLVLSLWDDH QVNMLWLDSI YPTDQPASQP GVKRGPCATS SGAPSDVESQ HPDSSVTFSD |
| | IRFGPIDSTY |
| SEQ ID NO: 111 | MFRKAALLAF SFLAIAHGQQ VGTNQAENHP SLPSQKCTAS GCTTSSTSVV LDANWRWVHT TTGYTNCYTG QTWDASICPD GVTCAKACAL DGADYSGTYG ITTSGNALTL |
| | QFVKGTNVGS RVYLLQDASN YQMFQLINQE FTFDVDMSNL PCGLNGAVYL SQMDQDGGVS RFPTNTAGAK YGTGYCDSQC PRDIKFINGE ANVEGWTGSS TDSNSGTGNY |
| | GTCCSEMDIW EANSVAAAYT PHPCSVNQQT RCTGADCGQG DDRYDGVCDP DGCDFNSFRM GDQTFLGKGL TVDTSRKFTI VTQFISDDGT TSGNLAEIRR FYVQDGNVIP |
| | NSKVSIAGID AVNSITDDFC TQQKTAFGDT NRFAAQGGLK QMGAALKSGM VLALSLWDDH AANMLWLDSD YPTTADASNP GVARGTCPTT SGFPRDVESQ SGSATVTYSN |
| | IKWGDLNSTF TGTLTTPSGS SSPSSPASTS GSSTSASSSA SVPTQSGTVA QWAQCGGIGY SGATTCVSPY TCHVVNAYYS QCY |
| SEQ ID NO: 112 | MYRAIATASA LIAAARAQQV CTLTTETKPA LTWSKCTSSG CTDVKGSVGI DANWRWTHQT SSSTNCYTGN KWDTSVCTSG ETCAQKCCLD GADYAGTYGI TSSGNQLSLG |
| | FVTKGSFSTN IGSRTYLMEN ENTYQMFQLL GNEFTFDVDV SNIGCGLNGA LYFVSMDADG GKARYPANKA GAKYGTGYCD AQCPRDVKFI NGKANSDGWK PSDSDINAGI |
| | GNMGTCCPEM DIWEANSIST AFTPHPCTKL TQHACTGDSC GGTYSNDRYG GTCDADGCDF NSYRQGNKTF YGRGSDFNVD TTKKVTVVTQ FKKGSNGRLS EITRLYVQNG |
| | KVIANSESKI PGNSGSSLTA DFCSKQKSVF GDIDDFSKKG GWSGMSDALE SPPMVLVMSL WHDHHSNMLW LDSTYPTDST KLGAQRGSCA TTSGVPSDLE RDVPNSKVSF |
| | SNIKFGPIGS TYSSGTTNPP PSSTDTSTTP TNPPTGGTVG QYGQCGGQTY TGPKDCKSPY TCKKINDFYS QCQ |
| SEQ ID NO: 113 | MSSFQIYRAA LLLSILATAN AQQVGTYTTE THPSLTWQTC TSDGSCTTND GEVVIDANWR WVHSTSSATN CYTGNEWDTS ICTDDVTCAA NCALDGATYE ATYGVTTSGS |
| | ELRLNFVTQG SSKNIGSRLY LMSDDSNYEL FKLLGQEFTF DVDVSNLPCG LNGALYFVAM DADGGTSEYS GNKAGAKYGT GYCDSQCPRD LKFINGEANC DGWEPSSNNV |
| | NTGVGDHGSC CAEMDVWEAN SISNAFTAHP CDSVSQTMCD GDSCGGTYSA SGDRYSGTCD PDGCDYNPYR LGNTDFYGPG LTVDTNSPFT VVTQFITDDG TSSGTLTEIK |
| | RLYVQNGEVI ANGASTYSSV NGSSITSAFC ESEKTLFGDE NVFDKHGGLE GMGEAMAKGM VLVLSLWDDY AADMLWLDSD YPVNSSASTP GVARGTCSTD SGVPATVEAE |
| | SPNAYVTYSN IKFGPIGSTY SSGSSSGSGS SSSSSSTTTK ATSTTLKTTS TTSSGSSSTS AAQAYGQCGG QGWTGPTTCV SGYTCTYENA YYSQCL |
| SEQ ID NO: 114 | MHQRALLFSA LLTAVRAQQA GTLTEEVHPS LTWQKCTSEG SCTEQSGSVV IDSNWRWTHS VNDSTNCYTG NTWDATLCPD DETCAANCAL DGADYESTYG VTTDGDSLTL |
| | KFVTGSNVGS RLYLMDTSDE GYQTFNLLDA EFTFDVDVSN LPCGLNGALY FTAMDADGGV SKYPANKAGA KYGTGYCDSQ CPRDLKFIDG QANVDGWEPS SNNDNTGIGN |
| | HGSCCPEMDI WEANKISTAL TPHPCDSSEQ TMCEGNDCGG TYSDDRYGGT CDPDGCDFNP YRMGNDSFYG PGKTIDTGSK MTVVTQFITD GSGSLSEIKR YYVQNGNVIA |
| | NADSNISGVT GNSITTDFCT AQKKAFGDED IFAEHNGLAG ISDAMSSMVL ILSLWDDYYA SMEWLDSDYP ENATATDPGV ARGTCDSESG VPATVEGAHP DSSVTFSNIK |
| | FGPINSTFSA SA |
| SEQ ID NO: 115 | MYAKFATLAA LVAGAAAQNA CTLTAENHPS LTWSKCTSGG SCTSVQGSIT IDANWRWTHR TDSATNCYEG NKWDTSYCSD GPSCASKCCI DGADYSSTYG ITTSGNSLNL |
| | KFVTKGQYST NIGSRTYLME SDTKYQMFQL LGNEFTFDVD VSNLGCGLNG ALYFVSMDAD GGMSKYSGNK AGAKYGTGYC DSQCPRDLKF INGEANVENW QSSTNDANAG |
| | TGKYGSCCSE MDVWEANNMA AAFTPHPCXV IGQSRCEGDS CGGTYSTDRY AGICDPDGCD FNSYRQGNKT FYGKGMTVDT TKKITVVTQF LKNSAGELSE IKRFYVQNGK |
| | VIPNSESTIP GVEGNSITQD WCDRQKAAFG DVTDXQDKGG MVQMGKALAG PMVLVMSIWD DHAVNMLWLD STWPIDGAGK PGAERGACPT TSGVPAEVEA EAPNSNVIFS |
| | NIRFGPIGST VSGLPDGGSG NPNPPVSSST PVPSSSTTSS GSSGPTGGTG VAKHYEQCGG IGFTGPTQCE SPYTCTKLND WYSQCL |
| SEQ ID NO: 116 | MYAKFATLAA LVAGASAQAV CSLTAETHPS LTWQKCTAPG SCTNVAGSIT IDANWRWTHQ TSSATNCYSG SKWDSSICTT GTDCASKCCI DGAEYSSTYG ITTSGNALNL |
| | KFVTKGQYST NIGSRTYLME SDTKYQMFKL LGNEFTFDVD VSNLGCGLNG ALYFVSMDAD GGMSKYSGNK AGAKYGTGYC DAQCPRDLKF INGEANVEGW ESSTNDANAG |
| | SGKYGSCCTE MDVWEANNMA TAFTPHPCTT IGQTRCEGDT CGGTYSSDRY AGVCDPDGCD FNSYRQGNKT FYGKGMTVDT TKKITVVTQF LKNSAGELSE IKRFYAQDGK |
| | VIPNSESTIA GIPGNSITKA YCDAQKTVFQ NTDDFTAKGG LVQMGKALAG DMVLVMSVWD DHAVNMLWLD STYPTDQVGV AGAERGACPT TSGVPSDVEA NAPNSNVIFS |
| | NIRFGPIGST VQGLPSSGGT SSSSSAAPQS TSTKASTTTS AVRTTSTATT KTTSSAPAQG TNTAKHWQQC GGNGWTGPTV CESPYKCTKQ NDWYSQCL |
| SEQ ID NO: 117 | MLTLVYFLLS LVVSLEIGTQ QSEDHPKLTW QNGSSSVSGS IVLDSNWRWV HDSGTTNCYD GNLWSKDLCP SSDTCSQKCY IEGADYSGTY GIQSSGSKLT LKFVTKGSYS |
| | TNIGSRVYLL KDENTYESFK LKNKEFTFTV DDSKLNCGLN GALYFVAMDA DGGKAKYSSF KPGAKYGMGY CDAQCPHDMK FISGKANVDD WKPQDNDENS GNGKLGTCCS |
| | EMDIWEGNMK SQAYTVHACT KSGQYECTGQ QCGDTDSGDR FKGTCDKDGC DYASWRWGDQ SFYGEGKTVD TKQPVTVVTQ FIGDPLTEIR RLYVQGGKTI NNSKTSNLAD |
| | TYDSITDKFC DATKEASGDT NDFKAKGAMS GFSTNLNNGQ VLVMSLWDDH TANMLWLDST YPTDSSDSTA QRGPCPTSSG VPKDVESQHG DATVVFSDIK FGAINSTFKY |
| | N |
| SEQ ID NO: 118 | MLAAALFTFA CSVGVGTKTP ENHPKLNWQN CASKGSCSQV SGEVTMDSNW RWTHDGNGKN CYDGNTWISS LCPDDKTCSD KCVLDGAEYQ ATYGIQSNGT ALTLKFVTHG |
| | SYSTNIGSRL YLLKDKSTYY VFKLNNKEFT FSVDVSKLPC GLNGALYFVE MDADGGKAKY AGAKPGAEYG LGYCDAQCPS DLKFINGEAN SEGWKPQSGD KNAGNGKYGS |
| | CCSEMDVWES NSQATALTPH VCKTTGQQRC SGKSECGGQD GQDRFAGLCD EDGCDFNNWR MGDKTFFGPG LIVDTKSPFV VVTQFYGSPV TEIRRKYVQN GKVIENSKSN |
| | IPGIDATAAI SDHFCEQQKK AFGDTNDFKN KGGFAKLGQV FDRGMVLVLS LWDDHQVAML WLDSTYPTNK DKSQPGVDRG PCPTSSGKPD DVESASADAT VVYGNIKFGA |
| | LDSTY |
| SEQ ID NO: 119 | MLTLVYFLLS LVVSLEIGTQ QSEDHPKLTW QNGSSSVSGS IVLDSNWRWV HDSGTTNCYD GNLWSKDLCP SSNTCSQKCY IEGADYSGTY GIQSSGSKLT LKFVTKGSYS |
| | TNIGSRVYLL KDENTYESFK LKNKEFTFTV DDSKLNCGLN GALYFVAMDA DGGKAKYSSF KPGAKYGMGY CDAQCPHDMK FISGKANVDD WKPQDNDENS GNGKLGTCCS |
| | EMDIWEGNMK SQAYTVHACT KSGQYECTGQ QCGDTDSGDR FKGTCDKDGC DYASWRWGDQ SFYGEGKTVD TKQPVTVVTQ FIGDPLTEIR RLYVQGGKTI NNSKTSNLAD |
| | TYDSITDKFC DATKEASGDT NDFKAKGAMS GFSTNLNNGQ VLVMSLWDDH TANMLWLDST YPTDSTKTGA SRGPCAVSSG VPKDVESQYG DATVIYSDIK FGAINSTFKW |
| | N |
| SEQ ID NO: 120 | MILALLSLAK SLGIATNQAE THPKLTWTRY QSKGSGQTVN GEIVLDSNWR WTHHSGTNCY DGNTWSTSLC PDPTTCSNNC DLDGADYPGT YGISTSGNSL KLGFVTHGSY |
| | STNIGSRVYL LRDSKNYEMF KLKNKEFTFT VDDSKLPCGL NGALYFVAMD EDGGVSKNSI NKAGAQYGTG YCDAQCPHDM KFINGEANVL DWKPQSNDEN SGNGRYGACC |
| | TEMDIWEANS MATAYTPHVC TVTGLRRCEG TECGDTDANQ RYNGICDKDG CDFNSYRLGD KTFFGVGKTV DSSKPVTVVT QFVTSNGQDS GTLSEIRRKY VQGGKVIENS |
| | KVNIAGITAG NSVTDTFCNE QKKAFGDNND FEKKGGLGAL SKQLDAGMVL VLSLWDDHSV NMLWLDSTYP TNAAAGALGT ERGACATSSG APSDVESQSP DATVTFSDIK |
| | FGPIDSTY |
| SEQ ID NO: 121 | MLVIALILRG LSVGTGTQQS ETHPSLSWQQ TSKGGSGQSV SGSVVLDSNW RWTHTTDGTT NCYDGNEWSS DLCPDASTCS SNCVLEGADY SGTYGITGSG SSLKLGFVTK |
| | GSYSTNIGSR VYLLGDESHY KLFKLENNEF TFTVDDSNLE CGLNGALYFV AMDEDGGASK YSGAKPGAKY GMGYCDAQCP HDMKFINGDA NVEGWKPSDN DENAGTGKWG |
| | ACCTEMDIWE ANKYATAYTP HICTKNGEYR CEGTDCGDTK DNNRYGGVCD KDGCDFNSWR MGNQSFWGPG LIIDTGKPVT VVTQFLADGG SLSEIRRKYV QGGKVIENTV |
| | TKISGMDEFD SITDEFCNQQ KKAFRDTNDF EKKGGLKGLG TAVDAGVVLV LSLWDDHDVN MLWLDSIYPT DSGSKAGADR GPCATSSGVP KDVESNYASA SVTFSDIKFG |
| | PIDSTY |
| SEQ ID NO: 122 | MLLALFAFGK SLGIATNQAE NHPKLTWTRY QSKGSGQTVN GEIVLDSNWR WTHHSGTNCY DGNTWSTSLC PDPTTCSNNC DLDGADYPGT YGISSSGNSL KLGFVTHGSY |
| | STNIGSRVYL LRDSKNYEMF KLKNKEFTFT VDDSKLPCGL NGALYFVAMD EDGGVSKNSI NKAGAQYGTG YCDAQCPHDM KFINGEANVL DWKPQSNDEN SGNGRYGACC |
| | TEMDIWEANS MATAYTPHVC TVTGIRRCEG TECGDTDANQ RYNGICDKDG CDFNSYRLGD KSFFGVGKTV DSSKPVTVVT QFVTSNGQDS GTLSEIRRKY VQGGKVIENS |
| | KVNIAGMAAG NSITDTFCNE QKKAFGDNND FEKKGGLGAL SKQLDSGMVL VLSLWDDHSV NMLWLDSTYP TNAAAGALGT ERGACATSSG APSDVESQSP DATVTFSDIK |
| | FGPIDSTY |
| SEQ ID NO: 123 | MLASVVYLVS LVVSLEIGTQ QSEEHPKLTW QNGSSSVSGS IVLDSNWRWL HDSGTTNCYD GNLWSDDLCP NADTCSSKCY IEGADYSGTY GITSSGSKVT LKFVTKGSYS |
| | TNIGSRIYLL KDENTYETFK LKNKEFTFTV DDSKLDCGLN GALYFVAMDA DGGKAKYSSF KPGAKYGMGY CDAQCPHDMK FISGKANVDD WKPQDNDENS GDGKLGTCCS |
| | EMDIWEGNAK SQAYTVHACS KSGQYECTGQ QCGDTDSGDR FKGTCDKDGC DYASWRWGDQ SFYGEGKTVD TKSPVTVVTQ FIGDPLTEIR RVYVQGGKTI NNSKTSNLAD |
| | TYDSITDKFC DATKDATGDT NDFKAKGAMA GFSTNLNTAQ VLVSVHCGMI IQPICCGLIR RIQRIQQKQV QAVDRVLCRR VFQRMLKASM VMLQSRTRTL SLELSTRPLV |
| | GISPAGRLFF F |
| SEQ ID NO: 124 | MILALLVLGK SLGIATNQAE THPKLTWTRY QSKGSGSTVN GEIVLDSNWR WTHHSGTNCY DGNTWSTSLC PDPTTCSNNC DLDGADYPGT YGISTSGNSL KLGFVTHGSY |
| | STNIGSRVYL LKDTKSYEMF KLKNKEFTFT VDDSKLPCGL NGALYFVAMD EDGGVSKNSI NKAGAQYGTG YCDAQCPHDM KFINGEANVL DWKPQSNDEN SGNGRYGACC |
| | TEMDIWEANS MATAYTPHVC TVTGLRRCEG TECGDTDNDQ RYNGICDKDG CDFNSYRLGD KSFFGVGKTV DSSKPVTVVT QFVTSNGQDS GTLSEIRRKY VQGGKVIENS |
| | KVNVAGITAG NSVTDTFCNE QKKAFGDNND FEKKGGLGAL SKQLDAGMVL VLSLWDDHSV NMLWLDSTYP TNAAAGALGT ERGACATSSG KPSDVESQSP DATVTFSDIK |
| | FGPIDSTY |
| SEQ ID NO: 125 | MLCIGLISFV YSLGVGTNTA ETHPKLTWKN GGQTVNGEVT VDSNWRWTHT KGSTKNCYDG NLWSKDLCPD AATCGKNCVL EGADYSGTYG VTSSGNALTL KFVTHGSYST |
| | NVGSRLYLLK DEKTYQMFNL NGKEFTFTVD VSNLPCGLNG ALYHVNMDED GGTKRYPDNE AGAKYGTGYC DAQCPTDLKF INGIPNSDGW KPQSNDKNSG NGKYGSCCSE |
| | MDIWEANSIC SAVTPHVCDN LQQTRCQGTA CGENGGGSRF GSSCDPDGCD FNSWRMGNKT FYGPGLIVDT KSKFTVVTQF VGNPVTEIKR KYVQNGKVIE NSYSNIEGMD |
| | KFNSVSDKFC TAQKKAFGDT DSFTKHGGFK QLGSALAKGM VLVLSLWDDH TVNMLWLDSV YPTNSKKAGS DRGPCPTTSG VPADVESKSA DANVIYSDIR FGAIDSTYK |
| SEQ ID NO: 126 | MLGALVALAS CIGVGTNTPE KHPDLKWTNG GSSVSGSIVV DSNWRWTHIK GETKNCYDGN LWSDKYCPDA ATCGKNCVLE GADYSGTYGV TTSGDAATLK FVTHGQYSTN |
| | VGSRLYLLKD EKTYQMFNLV GKEFTFTVDV SNLPCGLNGA LYFVQMDSDG GMAKYPDNQA GAKYGTGYCD AQCPTDLKFI NGIPNSDGWK PQKNDKNSGN GKYGSCCSEM |
| | DIWEANSMAT AYTPHVCDKL EQTRCSGSAC GQNGGGDRFS SSCDPDGCDF NSWRMGNKTF WGPGLIVDTK KPVQVVTQFV GSGGSVTEIK RKYVQGGKVI DNSMTNIAAM |
| | SKQYNSVSDE FCQAQKKAFG DNDSFTKHGG FRQLGATLSK GHVLVLSLWD DHDVNMLWLD SVYPTNSNKP GADRGPCKTS SGVPSDVESQ NADSTVKYSD IRFGAIDSTY |
| | SK |
| SEQ ID NO: 127 | MLAAALFTFA CSVGVGTKTT ETHPKLNWQQ CACKGSCSQV SGEVTMDSNW RWTHDGNGKN CYDGNTWISS LCPDDKTCSD KCVLDGAEYQ ATYGIQSNGT ALTPKFVTHG |
| | SYSTNIGSRL YLLKDKSTYY VFQLNNKEFT FSVDVSKLPC GLNGALYFVE MDADGGKSKY AGAKPGAEYG LGYCDAQCPS DLKFINGEAN SEGWKPQSGD KNAGNGKYGS |
| | CCSEMDVWES NSMATALTPH VCKTTGQTRC SGKSECGGQD GQDRFAGNCD EDGCDFNNWR MGDKTFFGPG LTVDTKSPFV VVTQFYGSPV TEIRRKYVQN GKVIENAKSN |
| | IPGIDATNAI SDTFCEQQKK AFGDTNDFKN KGGFTKLGSV FSRGMVLVLS LWDDHQVAML WLDSTYPTNK DKSVPGVDRG PCPTSSGKPD DVESASGDAT VVYGNIKFGA |
| | LDSTY |
| SEQ ID NO: 128 | MFGFLLSLFA LQFALEIGTQ TSESHPSITW ELNGARQSGQ IVIDSNWRWL HDSGTTNCYD GNTWSSDLCP DPEKCSQNCY LEGADYSGTY GISASGSQLT LGFVTKGSYS |
| | TNIGSRVYLL KDENTYPMFK LKNKEFTFTV DVSNLPCGLN GALYFVAMPS DGGKAKYPLA KPGAKYGMGY CDAQCPHDMK FINGEANVLD WKPQSNDENA GTGRYGTCCT |
| | EMDIWEANSQ ATAYTVHACS KNARCEGTEC GDDSASQRYN GICDKDGCDF NSWRWGNKTF FGPGLTVDSS KPVTVVTQFI GDPLTEIRRI WVQGGKVIQN SFTNVSGITS |
| | VDSITNTFCD ESKVATGDTN DFKAKGGMSG FSKALDTEVV LVLSLWDDHT ANMLWLDSTY PTDSTAIGAS RGPCATSSGD PKDVESASAN ASVKFSDIKF GALDSTY |
| SEQ ID NO: 129 | MLASLLPLSN SLGTASNQAE THPKLTWTQY TGKGAGQTVN GEIVLDSNWR WTHKDGTNCY DGNTWSSSLC PDPTTCSNNC NLDGADYPGT YGITTSGNQL KLGFVTHGSY |
| | STNIGSRVYL LRDSKNYQMF KLKNKEFTFT VDDSKLPCGL NGAVYFVAMD EDGGTAKHSI NKAGAQYGTG YCDAQCPHDM KFINGEANVL DWKPQSNDEN SGNGRWGARC |
| | TEMDIWEANS RATAYTPHIC TKTGLYRCEG TECGDSDTNR YGGVCDKDGC DFNSYRMGDK SFFGQGKTVD SSKPVTVVTQ FITDNNQDSG KLTEIRRKYV QGGKVIDNSK |
| | VNIAGITAGN PITDTFCDEA KKAFGDNNDF EKKGGLSALG TQLEAGFVLV LSLWDDHSVN MLWLDSTYPT NASPGALGVE RGDCAITSGV PADVESQSAD ASVTFSDIKF |
| | GPIDSTY |
| SEQ ID NO: 130 | MLCIGLISFV YSLGVGTNTA ETHPKLTWKN GGQTVNGEVT VDSNWRWTHT KGSTKNCYDG NLWSKDLCPD AATCGKNCVL EGADYSGTYG VTSSGNALTL KFVTHGSYST |
| | NVGSRLYLLK DEKTYQMFNL NGKEFTFTVD VSNLPCGLSG ALYHVNMDED GGTKRYPDNE AGAKYGTGYC DAQCPTDLKF INGIPNSDGW KPQSNDKNSG NGKYGSCCSE |
| | MDIWEANSIC SAVTPHVCDN LQQTRCQGAA CGENGGGSRF GSSCDPDGCD FNSWGMGNKT FYGPGLIVDT KSKFTVVTQF VGNPVTEIKR KYVQNGKVIE NSYSNIEGMD |
| | KFNSVSDKFC TAQKKAFGDT DSFTKHGGFK QLGSALAKGM VLVLSLWDDH TVNMLWLDSV YPTNSKKAGS DRGPCPTTSG VPADVESKSA DANVIYSDIR FGAIDSTYK |
| SEQ ID NO: 131 | MILALLVLGK SLGIATNQAE THPKLTWTRY QSKGSGSTVN GEIVLDSNWR WTHHSGTNCY DGNTWSTSLC PDPTTCSNNC DLDGADYPGT YGISTSGNSL KLGFVTHGSY |
| | STNIGSRVYL LRDSKNYEMF KLKNKEFTFT VDDSKLPCGL NGALYFVAMD EDGGVSKNSI NKAGAQYGTG YCDAQCPHDM KFINGEANVL DWKPQSNDEN SGNGRYGACC |
| | TEMDIWEANS MATAYTPHVC TVTGLRRCEG TECGDTDNDQ RYNGICDKDG CDFNSYRLGD KSFFGVGKTV DSSKPVTVVT QFVTSNGQDS GILSETRRKY VQGGKVIENS |
| | KVNVAGITAG NSVTDTFCNE QKKAFGDNND FEKKGGLGAL SKQLDAGMVL VLSLWDDHSV NMLWLDSTYP TNAAAGALGT ERGACATSSG KPSDVESQSP DATVTFSDIK |
| | FGPIDSTY |
| SEQ ID NO: 132 | MIGIVLIQTV FGIGVGTQQS ESHPSLSWQQ CSKGGSCTSV SGSIVLDSNW RWTHIPDGTT NCYDGNEWSS DLCPDPTTCS NNCVLEGADY SGTYGISTSG SSAKLGFVTK |
| | GSYSTNIGSR VYLLGDESHY KIFDLKNKEF TFTVDDSNLE CGLNGALYFV AMDEDGGASR FTLAKPGAKY GTGYCDAQCP HDIKFINGEA NVQDWKPSDN DDNAGTGHYG |
| | ACCTEMDIWE ANKYATAYTP HICTENGEYR CEGKSCGDSS DDRYGGVCDK DGCDFNSWRL GNQSFWGPGL IIDTGKPVTV VTQFVTKDGT DSGALSEIRR KYVQGGKTIE |
| | NTVVKISGID EVDSITDEFC NQQKQAFGDT NDFEKKGGLS GLGKAFDYGV VLVLSLWDDH DVNMLWLDSV YPTNPAGKAG ADRGPCATSS GDPKEVEDKY ASASVTFSDI |
| | KFGPIDSTY |
| SEQ ID NO: 133 | MLVFGIVSFV YSIGVGTNTA ETHPKLTWKN GGSTTNGEVT VDSNWRWTHT KGSTKNCYDG NLWSKDLCPD AATCGKNCVL EGADYSGTYG VTSSGDALTL KFVTHGSYST |
| | NVGSRLYLLK DEKTYQMFNL NGKEFTFTVD VSQLPCGLNG ALYFVCMDQD GGMSRYPDNQ AGAKYGTGYC DAQCPTDLKF INGLPNSDGW KPQSNDKNSG NGKYGSCCSE |
| | MDIWEANSLA TAVTPHVCDQ VGQTRCEGRA CGENGGGDRF GSICDPDGCD FNSWRMGNKT FWGPGLIIDT KKPVTVVTQF IGSPVTEIKR EYVQGGKVIE NSYTNIEGMD |
| | KFNSISDKFC TAQKKAFGDN DSFTKHGGFS KLGQSFTKGQ VLVLSLWDDH TVNMLWLDSV YPTNSKKLGS DRGPCPTSSG VPADVESKNA DSSVKYSDIR FGSIDSTYK |
| SEQ ID NO: 134 | MLSFVFLLGF GVSLEIGTQQ SENHPTLSWQ QCTSSGSCTS QSGSIVLDSN WRWVHDSGTT NCYDGNEWSS DLCPDPETCS KNCYLDGADY SGTYGITSNG SSLKLGFVTE |
| | GSYSTNIGSR VYLKKDTNTY QIFKLKNHEF TFTVDVSNLP CGLNGALYFV EMEADGGKGK YPLAKPGAQY GMGYCDAQCP HDMKFINGNA NVLDWKPQET DENSGNGRYG |
| | TCCTEMDIWE ANSQATAYTP HICTKDGQYQ CEGTECGDSD ANQRYNGVCD KDGCDFNSYR LGNKTFFGPG LIVDSKKPVT VVTQFITSNG QDSGDLTEIR RIYVQGGKTI |
| | QNSFTNIAGL TSVDSITEAF CDESKDLFGD TNDFKAKGGF TAMGKSLDTG VVLVLSLWDD HSVNMLWLDS TYPTDAAAGA LGTQRGPCAT SSGAPSDVES QSPDASVTFS |
| | DIKFGPLDST Y |
| SEQ ID NO: 135 | MLTLVVYLLS LVVSLEIGTQ QSESHPALTW QREGSSASGS IVLDSNWRWV HDSGTTNCYD GNEWSTDLCP SSDTCTQKCY IEGADYSGTY GITTSGSKLT LKFVTKGSYS |
| | TNIGSRVYLL KDENTYETFK LKNKEFTFTV DDSKLDCGLN GALYFVAMDA DGGKQKYSSF KPGAKYGMGY CDAQCPHDMK FISGKANVED WKPQDNDENS GNGKLGTCCS |
| | EMDIWEGNAK SQAYTVHACT KSGQYECTGT DCGDSDSRYQ GTCDKDGCDY ASYRWGDHSF YGEGKTVDTK QPITVVTQFI GDPLTEIRRL YIQGGKVINN SKTQNLASVY |
| | DSITDAFCDA TKAASGDTND FKAKGAMAGF SKNLDTPQVL VLSLWDDHTA NMLWLDSTYP TDSRDATAER GPCATSSGVP KDVESNQADA SVVFSDIKFG AINSTYSYN |
| SEQ ID NO: 136 | MFGFLLSLFA LQFALEIGTQ TSESHPSITW ELNGARQSGQ IVIDSNWRWL HDSGTTNCYD GNTWSSDLCP DPEKCSQNCY LEGADYSGTY GISASGSQLT LGFVTKGSYS |
| | TNIGSRVYLL KDENTYQMFK LKNKEFTFTV DVSNLPCGLN GALYFVAMPS DGGKAKYPLA KPGAKYGMGY CDAQCPHDMK FINGEANVLD WKPQSNDENA GTGRYGTCCT |
| | EMDIWEANSQ ATAYTVHACS KNARCEGTEC GDDSASQRYN GICDKDGCDF NSWRWGNKTF FGPGLTVDSS KPVTVVTQFI GDPLTEIRRI WVQGGKVIQN SFTNVSGITS |
| | VDSITNTFCD ESKVATGDTN DFKAKGGMSG FSKALDTEVV LVLSLWDDHT ANMLWLDSTY PSNSTAIGAT RGPCATSSGD PKNVESASAN ASVKFSDIKF GAFDSTY |
| SEQ ID NO: 137 | MLALVYFLLS LVVSLEIGTQ QSEDHPKLTW QNGSSSVSGS IVLDSNWRWV HDSGTTNCYD GNLWSTDLCP SSDTCTSKCY IEGADYSGTY GITSSGSKVT LKFVTKGSYS |
| | TNIGSRIYLL KDENTYETFK LKNKEFTFTV DDSQLNCGLN GALYFVAMDA DGGKAKYSSF KPGAKYGMGY CDAQCPHDMK FISGKANVDD WKPQDNDENS GNGKLGTCCS |
| | EMDIWEGNAK SQAYTVHACT KSGQYECTGQ QCGDTDSGDR FKGTCDKDGC DYASWRWGDQ SFYGEGKTVD TKQPVTVVTQ FIGDPLTEIR RLYVQGGKTI NNSKTSNLAD |
| | TYDSITDKFC DATKEASGDT NDFKAKGAMS GFSTNLNTAQ VLVLSLWDDH TANMLWLDST YPTDSTKTGA SRGPCAVTSG VPKDVESQYG SAQVVYSDIK FGAINSTY |
| SEQ ID NO: 138 | MLALVYFLLS FVVSLEIGTQ QSEDHPKLTW QNGSSSVSGS IVLDSNWRWV HDSGTTNCYD GNLWSTDLCG SSDTCSSKCY IEGADYSGTY GISASGSKLT LKFVTKGSYS |
| | TNIGSRVYLL KDENTYETFK LKGKEFTFTV DDSKLDCGLN GALYFVAMDA DGGKAKYSSF KPGAKYGMGY CDAQCPHDMK FISGKANVDD WKPQDNDENS GNGKLGTCCS |
| | EMDIWEGNAK SQAYTVHACT KSGQYECTGQ QCGDTDSGDR FKGTCDKDGC DYASWRWGDQ SFYGEGKTID TKQPVTVVTQ FIGDPLTEIR RVYVQGGKVI NNSKTSNLAN |
| | VYDSITDKFC DDTKDATGDT NDFKAKGAMS GFSTNLNTAQ VLVMSLWDDH TANMLWLDST YPTDSTKTGA SRGPCAVLSG VPKNVESQHG DATVIYSDIK FGAINSTFSY |
| | N |
| SEQ ID NO: 139 | MFLALFVLGK SLGIATNQAE NHPKLTWTRY QSKGSGQTVN GEVVLDSNWR WTHHSGTNCY DGNTWSTSLC PDPQTCSSNC DLDGADYPGT YGISSSGNSL KLGFVTHGSY |
| | STNIGSRVYL LRDSKNYEMF KLKNKEFTFT VDDSKLPCGL NGALYFVAME EDGGVAKNSI NKAGAQYGTG YCDAQCPHDM KFINGEANVL DWKPQSNDEN SGNGRYGACC |
| | IEMDIWEANS MATAYTPHVC TVTGIHRCEG TECGDTDANQ RYNGICDKDG CDFNSYRMGD KSFFGVGKTV DSSKPVTVVT QFVTSNGQDG GTLSEIKRKY VQGGKVIENS |
| | KVNIAGITAV NSITDTFCNE QKKAFGDNND FEKKGGLGAL SKQLDLGMVL VLSLWDDHSV NMLWLDSTYP TDAAAGALGT ERGACATSSG KPSDVESQSP DASVTFSDIK |
| | FGPIDSTY |
| SEQ ID NO: 140 | MLLCLLSIAN SLGVGTNTAE NHPKLSWKNG GSSVSGSVTV DANWRWTHIK GETKNCYDGN LWSDKYCPDA ATCGKNCVIE GADYQGTYGV SSSGDGLTLT FVTHGQYSTN |
| | VGSRLYLMKD EKTYQMFNLN GKEFTFTVDV SNLPCGLNGA LYFVQMDSDG GMAKYPDNQA GAKYGTGYCD AQCPTDLKFI NGIPNSDGWK PQKNDKNSGN GKYGSCCSEM |
| | DIWEANSQAT AYTPHVCDKL EQTRCSGSSC GHTGGGERFS SSCDPDGCDF NSWRMGNKTF WGPGLIVDTK KPVQVVTQFV GSGNSCTEIK RKYVQGGKVI DNSMSNIAGM |
| | SKQYNSVSDD FCQAQKKAFG DNDSFTKHGG FRQLGATLGK GHVLVLSLWD DHDVNMLWLD SVYPTNSNKP GSDRGPCKTS SGIPADVESQ AASSSVKYSD IRFGAIDSTY |
| | K |
| SEQ ID NO: 141 | MLCIGLISFV YSLGVGTNTA ETHPKLTWKN GGQTVNGEVT VDSNWRWTHT KGSTKNCYDG NLWSKDLCPD AATCGKNCVL EGADYSGTYG VTSSGNALTL KFVTHGSYST |
| | NVGSRLYLMK DEKTYQMFNL NGKEFTFTVD VSNLPCGLNG ALYHVNMDED GGTKRYPDNE AGAKYGTGYC DAQCPTDLKF INGIPNSDGW KPQSNDKNSG NGKYGSCCSE |
| | MDIWEANSIC SAVTPHVCDT LQQTRCQGTA CGENGGGSRF GSSCDPDGCD FNSWRMGNKT FYGPGLIVDT KSKFTVVTQF VGSPVTEIKR KYVQNGKVIE NSFSNIEGMD |
| | KFNSISDKFC TAQKKAFGDT DSFTKHGGFK QLGSALAKGM VLVLSLWDDH TVNMLWLDSV YPTNSKKAGS DRGPCPTTSG VPADVESKSA NANVIYSDIR FGAIDSTYK |
| SEQ ID NO: 142 | MLLCLLGIAS SLDAGTNTAE NHPQLSWKNG GSSVSGSVTV DANWRWTHIK GETKNCYDGN LWSDKYCPDA ATCGQNCVIE GADYQGTYGV SASGNALTLT FVTHGQYSTN |
| | VGSRLYLLKD EKTYQIFNLI GKEFTFTVDV SNLPCGLNGA LYFVQMDADG GTAKYSDNKA GAKYGTGYCD AQCPTDLKFI NGIPNSDGWK PQKNDKNSGN GRYGSCCSEM |
| | DVWEANSLAT AYTPHVCDKL EQVRCDGRAC GQNGGGDRFS SSCDPDGCDF NSWRLGNKTF WGPGLIVDTK QPVQVVTQWV GSGTSVTEIK RKYVQGGKVI DNSFTKLDSL |
| | TKQYNSVSDE FCVAQKKAFG DNDSFTKHGG FRQLGATLAK GHVLVLSLWD DHDVNMLWLD SVYPTNSNKP GADRGPCKTS SGVPADVESQ AASSSVKYSD IRFGAIDSTY |
| | K |
| SEQ ID NO: 143 | MLGIGFVCIV YSLGVGTNTA ENHPKLTWKN SGSTTNGEVT VDSNWRWTHT KGTTKNCYDG NLWSKDLCPD AATCGKNCVL EGADYSGTYG VTSSGDALTL KFVTHGSYST |
| | NVGSRLYLLK DEKTYQIFNL NGKEFTFTVD VSNLPCGLNG ALYFVNMDAD GGTGRYPDNQ AGAKYGTGYC DAQCPTDLKF INGIPNSDGW KPQSNDKNSG NGKYGSCCSE |
| | MDIWEANSLA TAVTPHVCDQ VGQTRCEGRA CGENGGGDRF GSSCDPDGCD FNSWRLGNKT FWGPGLIVDT KKPVTVVTQF VGSPVTEIKR KYVQGGKVIE NSYTNIEGLD |
| | KFNSISDKFC TAQKKAFGDN DSFIKHGGFR QLGQSFTKGQ VLVLSLWDDH TVNMLWLDSV YPTNSKKPGA DRGPCPTSSG VPADVESKNA GSSVKYSDIR FGSIDSTYK |
| SEQ ID NO: 144 | MATLVGILVS LFALEVALEI GTQTSESHPS LSWELNGQRQ TGSIVIDSNW RWLHDSGTTN CYDGNEWSSD LCPDPEKCSQ NCYLEGADYS GTYGISSSGN SLQLGFVTKG |
| | SYSTNIGSRV YLLKDENTYA TFKLKNKEFT FTADVSNLPC GLNGALYFVA MPADGGKSKY PLAKPGAKYG MGYCDAQCPH DMKFINGEAN ILDWKPSSND ENAGAGRYGT |
| | CCTEMDIWEA NSQATAYTVH ACSKNARCEG TECGDDDGRY NGICDKDGCD FNSWRWGNKT FFGPNLIVDS SKPVTVVTQF IGDPLTEIRR IYVQGGKVIQ NSFTNISGVA |
| | SVDSITDAFC NENKVATGDT NDFKAKGGMS GFSKALDTEV VLVLSLWDDH TANMLWLDST YPTDSSALGA SRGPCAITSG EPKDVESASA NASVKFSDIK FGAIDSTY |
| SEQ ID NO: 145 | MLTLVYFLLS LVVSLEIGTQ QSESHPQLSW QNGSSSVSGS IVLDSNWRWV HDSGTTNCYD GNLWSTDLCP SSDTCTSKCY IEGADYSGTY GITSSGSKLT LKFVTKGSYS |
| | TNIGSRVYLL KDENTYETFK LKNKEFTFTV DDSKLDCGLN GALYFVAMDA DGGKAKYSSF KPGAKYGMGY CDAQCPHDMK FISGKANVDD WKPQDNDENS GNGKLGTCCS |
| | EMDIWEGNAK SQAYTVHACT KSGQYECTGQ QCGDTDSGDR FKGTCDKDGC DYASWRWGDQ SFYGEGKTVD TKQPLTVVTQ FVGDPLTEIR RVYVQGGKTI NNSKTSNLAD |
| | TYDSITDKFC DATKEASGDT NDFKAKGAMS GFSTNLNTAQ VLVMSLWDDH TANMLWLDST YPTDSTKTGA SRGPCAVSSG VPKDVESQHG DATVIYSDIK FGAINSTFKW |
| | N |
| SEQ ID NO: 146 | MLSLVSIFLV GLGFSLGVGT QQSESHPSLS WQNCSAKGSC QSVSGSIVLD SNWRWLHDSG TTNCYDGNEW STDLCPDAST CDKNCYIEGA DYSGTYGITS SGAQLKLGFV |
| | TKGSYSTNIG SRVYLLRDES HYQLFKLKNH EFTFTVDDSQ LPCGLNGALY FVEMAEDGGA KPGAQYGMGY CDAQCPHDMK FITGEANVKD WKPQETDENA GNGHYGACCT |
| | EMDIWEANSQ ATAYTPHICS KTGIYRCEGT ECGDNDANQR YNGVCDKDGC DFNSYRLGNK TFWGPGLTVD SNKAMIVVTQ FTTSNNQDSG ELSEIRRIYV QGGKTIQNSD |
| | TNVQGITTTN KITQAFCDET KVTFGDTNDF KAKGGFSGLS KSLESGAVLV LSLWDDHSVN MLWLDSTYPT DSAGKPGADR GPCAITSGDP KDVESQSPNA SVTFSDIKFG |
| | PIDSTY |
| SEQ ID NO: 147 | MILALLVLGK SLGIATNQAE THPKLTWTRY QSKGSGSTVN GEIVLDSNWR WTHHSGTNCY DGNTWSTSLC PDPTTCSNNC DLDGADYPGT YGISTSGNSL KLGFVTHGSY |
| | STNIGSRVYL LKDTKSYEMF KLKNKEFTFT VDDSKLPCGL NGALYFVAMD EDGGVSKNSI NKAGAQYGTG YCDAQCPHDM KFINGEANVL DWKPQSNDEN SGNGRYGACC |
| | TEMDIWEANS MATAYTPHVC TVTGLRRCEG TECGDTDNDQ RYNGICDKDG CDFNSYRLGD KSFFGVGKTV DSSKPVTVVT QFVTSNGQDS GTLSEIRRKY VQGGKVIENS |
| | KVNVAGITAG NSVTDTFCNE QKKAFGDNND FEKKGGFGAL SKQLVAGMVL VLSLWDDHSV NMLWLDSTYP TNAAAGALGT ERGACATSSG KPSDVESQSP DATVTFSDIK |
| | FGPIDSTY |
| SEQ ID NO: 148 | MLCVGLFGLV YSIGVGTNTQ ETHPKLSWKQ CSSGGSCTTQ QGSVVIDSNW RWTHSTKDLT NCYDGNLWDS TLCPDGTTCS KNCVLEGADY SGTYGITSSG DSLTLKFVTH |
| | GSYSTNVGSR LYLLKDDNNY QIFNLAGKEF TFTVDVSNLP CGLNGALYFV EMDQDGGKGK HKENEAGAKY GTGYCDAQCP TDLKFIDGIA NSDGWKPQDN DENSGNGKYG |
| | SCCSEMDIWE ANSLATAYTP HVCDTKGQKR CQGTACGENG GGDRFGSECD PDGCDFNSWR QGNKSFWGPG LIIDTKKSVQ VVTQFIGSGS SVTEIRRKYV QNGKVIENSY |
| | STISGTEKYN SISDDYCNAQ KKAFGDTNSF ENHGGFKRFS QHIQDMVLVL SLWDDHTVNM LWLDSVYPTN SNKPGADRGP CETSSGVPAD VESKSASASV KYSDIRFGPI |
| | DSTYK |
| SEQ ID NO: 149 | MLLCLWSIAY SLGVGTNTAE NHPKLSWKNG GSSVSGSVTV DANWRWTHIK GETKNCYDGN LWSDKYCPDA ATCGKNCVIE GADYQGTYGV SASGDGLTLT FVTHGQYSTN |
| | VGSRLYLMKD EKTYQIFNLN GKEFTFTVDV SNLPCGLNGA LYFVQMDSDG GMAKYPDNQA GAKYGTGYCD AQCPTDLKFI NGIPNSDGWK PQKNDKNSGN GKYGSCCSEM |
| | DIWEANSQAT AYTPHVCDKL EQTRCSGSAC GHTGGGERFS SSCDPDGCDF NSWRMGNKTF WGPGLIVDTK KPVQVVTQFV GSGNSCTEIK RKYVQGGKVI DNSMSNIAGM |
| | TKQYNSVSDD FCQAQKKAFG DNDSFTKHGG FRQLGATLGK GHVLVLSLWD DHDVNMLWLD SVYPTNSNKP GSDRGPCKTS SGIPADVESQ AASSSVKYSD IRFGAIDSTY |
| | K |
| SEQ ID NO: 299 | QSACTLQSET HPPLTWQKCS SGGTCTQQTG SVVIDANWRW THATNSSTNC YDGNTWSSTL CPDNETCAKN CCLDGAAYAS TYGVTTSGNS LSIGFVTQSA QKNVGARLYL |
| | MASDTTYQEF TLLGNEFSFD VDVSQLPCGL NGALYFVSMD ADGGVSKYPT NTAGAKYGTG YCDSQCPRDL KFINGQANVE GWEPSSNNAN TGIGGHGSCC SEMDIWEANS |
| | ISEALTPHPC TTVGQEICEG DGCGGTYSDN AYGGTCDPDG CDWNPYRLGN TSFYGPGSSF TLDTTKKLTV VTQFETSGAI NRYYVQNGVT FQQPNAELGS YSGNELNDDY |
| | CTAEEAEFGG SSFSDKGGLT QFKKATSGGM VLVMSLWDDY YANMLWLDST YPTNETSSTP GAVRGSCSTS SGVPAQVESQ SPNAKVTFSN IKFGPIGSTG NPSGGNPPGG |
| | NPPGTTTTRR PATTTGSSPG PTQSHYGQCG GIGYSGPTVC ASGTTCQVLN PYYSQCL |
| SEQ ID NO: 300 | QSACTLQSET HPPLTWQKCS SGGTCTQQTG SVVIDANWRW THATNSSTNC YDGNTWSSTL CPDNETCAKN CCLDGAAYAS TYGVTTSGNS LSIGFVTQSA QKNVGARLYL |
| | MASDTTYQEF TLLGNEFSFD VDVSQLPCGL NGALYFVSMD ADGGVSKYPT NTAGAKYGTG YCDSQCPRDL KFINGQANVE GWEPSSNNAN TGIGGHGSCC SEMDIWEANS |
| | ISEALTPHPC TTVGQEICEG DGCGGTYSDN RYGGTCDPDG CDWNPYRLGN TSFYGPGSSF TLDTTKKLTV VTQFETSGAI NRYYVQNGVT FQQPNAELGS YSGNELNDDY |
| | CTAEEAEFGG SSFSDKGGLT QFKKATSGGM VLVMSLWDDY YANMLWLDST YPTNETSSTP GAVAGSCSTS SGVPAQVESQ SPNAKVTFSN IKFGPIGSTG NPSGGNPPGG |
| | NPPGTTTTRR PATTTGSSPG PTQSHYGQCG GIGYSGPTVC ASGTTCQVLN PYYSQCL |
| SEQ ID NO: 301 | MSALNSFNMY KSALILGSLL ATAGAQQIGT YTAETHPSLS WSTCKSGGSC TTNSGAITLD ANWRWVHGVN TSTNCYTGNT WNTAICDTDA SCAQDCALDG ADYSGTYGIT |
| | TSGNSLRLNF VTGSNVGSRT YLMADNTHYQ IFDLLNQEFT FTVDVSHLPC GLNGALYFVT MDADGGVSKY PNNKAGAQYG VGYCDSQCPR DLKFIAGQAN VEGWTPSSNN |
| | ANTGLGNHGA CCAELDIWEA NSISEALTPH PCDTPGLSVC TTDACGGTYS SDKYAGTCDP DGCDFNPYRL GVTDFYGSGK TVDTTKPITV VTQFVTDDGT STGTLSEIRR |
| | YYVQNGVVIP QPSSKISGVS GNVINSDFCD AEISTFGETA SFSKHGGLAK MGAGMEAGMV LVMSLWDDYS VNMLWLDSTY PTNATGTPGA AKGSCPTTSG DPKTVESQSG |
| | SSYVTFSDIR VGPFNSTFSG GSSTGGSSTT TASGTTTTKA SSTSTSSTST GTGVAAHWGQ CGGQGWTGPT TCASGTTCTV VNPYYSQCL |
| SEQ ID NO: 302 | QQIGTYTAET HPSLSWSTCK SGGSCTTNSG AITLDANWRW VHGVNTSTNC YTGNTWNTAI CDTDASCAQD CALDGADYSG TYGITTSGNS LRLNFVTGSN VGSRTYLMAD |
| | NTHYQIFDLL NQEFTFTVDV SHLPCGLNGA LYFVTMDADG GVSKYPNNKA GAQYGVGYCD SQCPRDLKFI AGQANVEGWT PSSNNANTGL GNHGACCAEL DIWEANSISE |
| | ALTPHPCDTP GLSVCTTDAC GGTYSSDKYA GTCDPDGCDF NPYRLGVTDF YGSGKTVDTT KPITVVTQFV TDDGTSTGTL SEIRRYYVQN GVVIPQPSSK ISGVSGNVIN |
| | SDFCDAEIST FGETASFSKH GGLAKMGAGM EAGMVLVMSL WDDYSVNMLW LDSTYPTNAT GTPGAAKGSC PTTSGDPKTV ESQSGSSYVT FSDIRVGPFN STFSGGSSTG |
| | GSSTTTASGT TTTKASSTST SSTSTGTGVA AHWGQCGGQG WTGPTTCASG TTCTVVNPYY SQCL |

TABLE 8

| | | | MUL Data | | Saccharification | | |
|---|---|---|---|---|---|---|---|
| | | | | Tolerance | % | % | RPLC |
| | | | SA (μmol | at 1 mM | Conversion | Conversion | Quantification |
| Group | variant | IC₅₀ | 4 MU/min/mg) | CB | (measured) | (measured) | (μg/mL) |
| WT | control | 0.05 | 0.60 | 6% | 9.8% | 5.9% | 21.6 |
| 268_{—} | Ala | 0.87 | 1.42 | 48% | 4.8% | 4.7% | 16.9 |
| 268_{—} | Ile | 0.61 | 1.61 | 40% | 4.4% | 3.4% | 11.5 |
| 268_{—} | Leu | 0.58 | 11.27 | 36% | 5.1% | 0.9% | 1.7 |
| 268_{—} | Val | 0.56 | 1.39 | 37% | 3.1% | 2.6% | 8.6 |
| 268_{—} | Phe | 0.40 | 0.70 | 21% | 1.8% | 1.1% | 2.5 |
| 268_{—} | Trp | 0.61 | 1.31 | 42% | 2.1% | 2.3% | 7.0 |
| 268_{—} | Tyr | 0.45 | 0.65 | 35% | 2.6% | 2.9% | 9.8 |
| 268_{—} | Asp | 0.90 | 0.67 | 44% | 3.0% | 2.5% | 7.8 |
| 268_{—} | Glu | 0.87 | 0.88 | 52% | 2.4% | 2.1% | 6.3 |
| 268_{—} | Arg | 0.03 | 0.52 | 3% | 8.3% | 5.7% | 20.8 |
| 268_{—} | His | 0.25 | 1.21 | 20% | 5.2% | 4.9% | 17.5 |
| 268_{—} | Lys | 0.15 | 1.28 | 12% | 5.8% | 6.5% | 24.2 |
| 268_{—} | Asn | 0.67 | 13.97 | 41% | 2.6% | 0.6% | 0.5 |
| 268_{—} | Gln | ND | | | | | |
| 268_{—} | Ser | 0.74 | 1.00 | 45% | 2.7% | 2.6% | 8.3 |
| 268_{—} | Thr | 0.60 | 0.97 | 42% | 2.1% | 1.9% | 5.5 |
| 268_{—} | Cys | 0.52 | 0.86 | 35% | 2.4% | 2.2% | 6.7 |
| 268_{—} | Gly | 0.64 | 0.93 | 43% | 3.6% | 3.3% | 11.1 |
| 268_{—} | Met | | | | | | |
| 268_{—} | Pro | 0.62 | 1.70 | 40% | 2.7% | 2.7% | 8.9 |
| 268_+411A | Ala | 1.33 | 0.52 | 65% | 4.7% | 4.1% | 14.4 |
| 268_+411A | Ile | 10.38 | 0.89 | 90% | 2.8% | 3.1% | 10.3 |
| 268_+411A | Leu | 7.05 | 0.82 | 88% | 2.7% | 3.5% | 12.1 |
| 268_+411A | Val | 7.48 | 1.33 | 93% | 3.7% | 3.2% | 10.6 |
| 268_+411A | Phe | | | — | 0.7% | 0.5% | |
| 268_+411A | Trp | 7.01 | 0.81 | 84% | 2.7% | 3.4% | 11.8 |
| 268_+411A | Tyr | | | | | | |
| 268_+411A | Asp | 11.26 | 0.22 | 85% | 1.2% | 1.3% | 3.4 |
| 268_+411A | Glu | | | | | | |
| 268_+411A | Arg | 1.60 | 0.38 | 72% | 2.5% | 2.3% | 7.0 |
| 268_+411A | His | 4.84 | 0.98 | 95% | 3.5% | 3.6% | 12.5 |
| 268_+411A | Lys | 6.32 | 1.03 | 93% | 1.4% | 1.0% | 2.1 |
| 268_+411A | Asn | | | | | | |
| 268_+411A | Gln | | −0.45 | — | 0.6% | 0.7% | 0.9 |
| 268_+411A | Ser | 6.31 | 1.62 | 96% | 2.9% | 2.4% | 7.8 |
| 268_+411A | Thr | | | | | | |
| 268_+411A | Cys | 17.68 | 0.28 | — | 0.9% | 0.8% | 1.4 |
| 268_+411A | Gly | 9.53 | 0.80 | 99% | 2.9% | 3.5% | 12.0 |
| 268_+411A | Met | 8.66 | 0.83 | 95% | 2.6% | 3.1% | 10.4 |
| 268_+411A | Pro | 7.31 | 1.80 | 80% | 2.8% | 3.3% | 11.2 |
| 268A+411_{—} | Ala | 5.56 | 1.19 | 83% | 3.3% | 4.8% | 17.0 |
| 268A+411_{—} | Ile | 28.03 | 0.58 | 107% | 1.2% | 1.2% | 2.6 |
| 268A+411_{—} | Leu | 25.06 | 1.72 | 99% | 1.4% | 0.9% | 1.6 |
| 268A+411_{—} | Val | 15.07 | 1.39 | 102% | 1.7% | 2.2% | 6.6 |
| 268A+411_{—} | Phe | 19.07 | 0.97 | 100% | 1.8% | 3.0% | 10.1 |
| 268A+411_{—} | Trp | 28.40 | 3.07 | 97% | 1.5% | 1.1% | 2.5 |
| 268A+411_{—} | Tyr | | | | | | |
| 268A+411_{—} | Asp | 10.25 | 2.12 | 93% | 1.9% | 1.9% | 5.4 |
| 268A+411_{—} | Glu | 16.89 | 0.74 | 95% | 1.9% | 1.8% | 5.3 |
| 268A+411_{—} | Arg | 0.61 | 1.56 | 39% | 4.6% | 5.2% | 18.6 |
| 268A+411_{—} | His | 29.34 | 0.38 | — | 0.9% | 0.8% | 1.0 |
| 268A+411_{—} | Lys | 7.36 | 1.08 | 88% | 1.8% | 2.8% | 9.1 |
| 268A+411_{—} | Asn | | | | | | |
| 268A+411_{—} | Gln | 15.11 | 1.33 | 99% | 2.0% | 2.2% | 6.7 |
| 268A+411_{—} | Ser | 5.69 | 3.19 | 91% | 3.3% | 2.1% | 6.3 |
| 268A+411_{—} | Thr | 10.12 | 1.39 | 91% | 1.8% | 2.6% | 8.3 |
| 268A+411_{—} | Cys | 7.66 | 1.58 | 85% | 2.7% | 3.9% | 13.7 |
| 268A+411_{—} | Gly | 12.07 | 0.88 | 91% | 2.3% | 2.4% | 7.7 |
| 268A+411_{—} | Met | 11.51 | 0.87 | 97% | 2.1% | 3.4% | 11.5 |
| 268A+411_{—} | Pro | 17.92 | 0.18 | — | 1.1% | 0.8% | 1.3 |
| 411_{—} | Ala | 1.79 | 0.35 | 65% | 2.5% | 1.9% | 5.5 |
| 411_{—} | Ile | | | | | | |
| 411_{—} | Leu | 6.86 | 0.25 | — | 1.6% | 0.9% | 1.7 |
| 411_{—} | Val | 3.35 | 0.51 | 82% | 4.2% | 3.3% | 11.2 |
| 411_{—} | Phe | 6.26 | 0.43 | 89% | 3.0% | 3.7% | 12.7 |
| 411_{—} | Trp | 10.91 | 2.19 | 100% | 2.1% | 0.9% | 1.6 |
| 411_{—} | Tyr | 5.40 | 0.67 | 85% | 3.5% | 3.9% | 13.4 |
| 411_{—} | Asp | 2.08 | 0.23 | 106% | 1.7% | 1.2% | 2.6 |
| 411_{—} | Glu | 2.95 | 0.38 | 76% | 2.5% | 2.0% | 6.1 |
| 411_{—} | Arg | 0.09 | 0.60 | — | 4.0% | 2.6% | 8.3 |
| 411_{—} | His | 3.66 | 0.52 | 84% | 4.7% | 5.1% | 18.4 |
| 411_{—} | Lys | 3.13 | 0.46 | 82% | 4.7% | 4.6% | 16.2 |
| 411_{—} | Asn | 5.16 | 0.20 | 75% | 2.7% | 2.4% | 7.5 |
| 411_{—} | Gln | | −0.85 | — | 0.8% | 0.6% | 0.4 |
| 411_{—} | Ser | 1.05 | 0.51 | 60% | 4.2% | 3.2% | 10.6 |
| 411_{—} | Thr | 1.78 | 0.49 | 65% | 3.9% | 3.6% | 12.2 |
| 411_{—} | Cys | 1.60 | 0.52 | 71% | 4.7% | 5.1% | 18.4 |
| 411_{—} | Gly | 2.01 | 0.48 | 72% | 4.4% | 3.5% | 12.1 |
| 411_{—} | Met | 3.88 | 0.45 | 84% | 3.3% | 3.1% | 10.3 |
| 411_{—} | Pro | 1.13 | 0.58 | 61% | 3.6% | 2.0% | 5.8 |

TABLE 9

| Sample Name | Average IC₅₀ | StDev IC₅₀ |
|---|---|---|
| 268A+411A | 8.550 | 0.150 |
| 268A+411V | 15.982 | 0.839 |
| 268A+411F | 23.082 | 2.644 |
| 268A+411D | 11.846 | 0.587 |
| 268A+411R | 0.414 | 0.076 |
| 268A+411K | 9.234 | 0.101 |
| 268A+411Q | 14.057 | 0.512 |
| 268A+411S | 8.280 | 0.260 |
| 268A+411T | 13.457 | 0.654 |
| 268A+411C | 12.552 | 0.267 |
| 268A+411G | 17.298 | 1.035 |
| 268A+411M | 12.192 | 0.038 |
| 268A+411A | 0.933 | 0.095 |
| 268I+411A | 13.958 | 0.142 |
| 268L+411A | 13.906 | 1.055 |
| 268V+411A | 10.879 | 0.763 |
| 268F+411A | 9.648 | 0.155 |
| 268W+411A | 11.486 | 0.437 |
| 268R+411A | 0.994 | 0.089 |
| 268H+411A | 5.319 | 0.411 |
| 268Q+411A | 9.731 | 1.985 |
| 268S+411A | 11.430 | 0.126 |
| 268G+411A | 9.823 | 0.503 |
| 268M+411A | 13.355 | 1.405 |
| 268P+411A | 8.945 | 0.560 |
| R268A | 0.423 | 0.002 |
| R268I | 0.320 | 0.008 |
| R268L | 0.373 | 0.020 |
| R268V | 0.335 | 0.000 |
| R268W | 0.475 | 0.017 |
| R268Y | 0.344 | 0.015 |
| R268D | 0.431 | 0.067 |
| R268E | 0.540 | 0.068 |
| R268R | 0.046 | 0.004 |
| R268H | 0.209 | 0.007 |
| R268K | 0.093 | 0.024 |
| R268N | 0.405 | 0.064 |
| R268S | 0.406 | 0.021 |
| R268T | 0.360 | 0.041 |
| R268C | 0.335 | 0.025 |
| R268G | 0.358 | 0.016 |
| R268P | 0.440 | 0.039 |
| R411A | 0.918 | 0.002 |
| R411V | 3.193 | 0.379 |
| R411F | 5.386 | |
| R411Y | 4.954 | 0.068 |
| R411R | 0.035 | 0.008 |
| R411H | 2.429 | 0.426 |
| R411K | 2.080 | 0.329 |
| R411N | 6.722 | |
| R411S | 0.762 | 0.024 |
| R411C | 0.886 | 0.023 |
| R411G | 1.470 | 0.386 |
| R411M | 2.597 | 0.428 |
| R411P | 1.048 | 0.145 |
| WT | 0.029 | 0.002 |
| WT | 0.034 | 0.005 |
| WT | 0.030 | 0.000 |
| WT | 0.047 | 0.002 |
| WT | 0.038 | 0.003 |
| WT | 0.038 | 0.001 |
| WT | 0.042 | 0.005 |

TABLE 10

| Variant | IC₅₀ | StDev | n |
|---|---|---|---|
| 268A+411A | 6.855 | | 1 |
| 268A+411V | 12.311 | | 1 |
| 268A+411F | 15.108 | | 1 |
| 268A+411W | 42.065 | 4.169 | 3 |
| 268A+411D | 11.675 | 3.164 | 2 |
| 268A+411R | 0.453 | | 1 |
| 268A+411K | 7.784 | | 1 |
| 268A+411Q | 12.145 | | 1 |
| 268A+411S | 8.366 | 2.211 | 2 |
| 268A+411T | 9.647 | | 1 |
| 268A+411C | 9.054 | 3.663 | 2 |
| 268A+411G | 13.492 | | 1 |
| 268A+411M | 10.734 | | 1 |
| 268A+411P | 9.310 | 0.656 | 3 |
| 268A+411A | 1.030 | | 1 |
| 268I+411A | 11.502 | | 1 |
| 268L+411A | 11.422 | | 1 |
| 268V+411A | 8.721 | | 1 |
| 268F+411A | 9.795 | | 1 |
| 268W+411A | 9.902 | | 1 |
| 268Y+411A | 10.917 | 2.034 | 3 |
| 268D+411A | 14.351 | 1.620 | 2 |
| 268E+411A | 16.694 | 0.479 | 3 |
| 268R+411A | 1.296 | | 1 |
| 268H+411A | 5.581 | | 1 |
| 268N+411A | 13.277 | 0.914 | 3 |
| 268Q+411A | 7.931 | | 1 |
| 268S+411A | 9.122 | | 1 |
| 268G+411A | 8.997 | | 1 |
| 268M+411A | 12.050 | | 1 |
| 268P+411A | 9.085 | | 1 |
| R268A | 0.574 | | 1 |
| R268I | 0.484 | | 1 |
| R268L | 0.484 | | 1 |
| R268V | 0.383 | | 1 |
| R268W | 0.497 | | 1 |
| R268Y | 0.434 | | 1 |
| R268D | 0.467 | | 1 |
| R268E | 0.555 | | 1 |
| R268R | 0.052 | | 1 |
| R268H | 0.283 | | 1 |
| R268K | 0.134 | | 1 |
| R268N | 0.482 | | 1 |
| R268S | 0.452 | | 1 |
| R268T | 0.349 | | 1 |
| R268C | 0.351 | | 1 |
| R268G | 0.455 | | 1 |
| R268P | 0.591 | | 1 |
| R411A | 1.063 | | 1 |
| R411V | 2.903 | | 1 |
| R411F | 7.577 | | 1 |
| R411Y | 5.252 | | 1 |
| R411D | 1.578 | 0.139 | 2 |
| R411R | 0.055 | | 1 |
| R411H | 3.223 | | 1 |
| R411K | 3.055 | | 1 |
| R411S | 0.895 | | 1 |
| R411T | 1.999 | 0.092 | 3 |
| R411C | 1.314 | | 1 |
| R411G | 2.307 | | 1 |
| R411M | 4.263 | | 1 |
| R411P | 1.270 | | 1 |
| WT | 0.070 | 0.003 | 7 |

TABLE 11

| Variant | IC₅₀ | StDev | n |
|---|---|---|---|
| 268A+411A | 12.089 | | 1 |
| 268A+411I | 35.003 | 4.911 | 2 |
| 268A+411L | 21.530 | 1.050 | 2 |
| 268A+411W^{¥} | 32.376 | | 1 |
| 268A+411E | 13.144 | 4.574 | 2 |
| 268A+411H | 21.293 | 4.387 | 2 |
| 268A+411Q | 13.304 | | |
| 268A+411P^{¥} | 14.485 | | 1 |
| 268D+411A | 17.680 | | 1 |
| 268K+411A | 6.084 | 1.054 | 3 |
| 268C+411A | 24.892 | 4.393 | 2 |
| R268F | 0.515 | 0.028 | 2 |
| R411L | 6.387 | 0.136 | 2 |
| R411W | 7.739 | 0.260 | 2 |
| R411D | 1.636 | 0.279 | 2 |
| R411E | 3.381 | 0.649 | 2 |
| R411N^{¥} | 7.896 | | 1 |
| R411Q | 2.513 | | 1 |
| R411T | 2.025 | 0.280 | 2 |
| WT | 0.056 | 0.020 | 2 |
| WT | 0.066 | 0.011 | 2 |

^{¥}poor fit; R² < 0.95

TABLE 12

| | | 268_{—} | | 411_{—} | | 268A+411_{—} | | |
|---|---|---|---|---|---|---|---|---|
| AA class | Variant | Measured | ↑ in IC₅₀ | Measured | ↑ in IC₅₀* | Measured | ↑ in IC₅₀* | Expected IC₅₀ |
| Aliphatic | Ala | 0.57 | 12.5 | 1.17 | 26 | 8.32 | 181 | 1.75 |
| Aliphatic | Ile | 0.43 | 9.4 | ND | 0 | 32.68 | 712 | ND |
| Aliphatic | Leu | 0.45 | 9.8 | 6.54 | 143 | 22.71 | 495 | 7.12 |
| Aliphatic | Val | 0.40 | 8.8 | 3.16 | 69 | 14.83 | 323 | 3.73 |
| Aromatic | Phe | 0.48 | 10.4 | 6.41 | 140 | 20.09 | 437 | 6.98 |
| Aromatic | Trp | 0.51 | 11.2 | 8.80 | 192 | 37.39 | 814 | 9.37 |
| Aromatic | Tyr | 0.39 | 8.5 | 5.14 | 112 | ND | | |
| Charged-Acidic | Asp | 0.56 | 12.1 | 1.70 | 37 | 11.46 | 250 | 2.28 |
| Charged-Acidic | Glu | 0.63 | 13.6 | 3.24 | 70 | 14.39 | 313 | 3.81 |
| Charged-Basic | Arg | 0.04 | 1.0 | 0.05 | 1 | 0.47 [symbol] | 10 | 0.63 |
| Charged-Basic | His | 0.24 | 5.2 | 2.93 | 64 | 23.97 | 522 | 3.51 |
| Charged-Basic | Lys | 0.12 | 2.5 | 2.59 | 56 | 8.40 | 183 | 3.16 |
| Polar | Asn | 0.49 | 10.7 | 6.59 | 144 | ND | | |
| Polar | Gln | ND | — | 2.51 [symbol] | 55 | 13.73 | 299 | 3.09 |
| Polar | Ser | 0.50 | 10.9 | 0.87 | 19 | 7.80 | 170 | 1.44 |
| Polar | Thr | 0.42 | 9.1 | 1.97 | 43 | 11.67 | 254 | 2.54 |
| Special | Cys | 0.38 | 8.4 | 1.17 | 25 | 10.17 | 222 | 1.74 |
| Special | Gly | 0.45 | 9.9 | 1.81 | 40 | 15.04 | 328 | 2.39 |
| Special | Met | ND | | 3.34 | 73 | 11.66 | 254 | 3.91 |
| Special | Pro | 0.52 | 11.4 | 1.13 | 25 | 12.07 | 263 | 1.70 |

| | | | | | | | |
|---|---|---|---|---|---|---|---|
| average | 0.42 | 8.3 | 3.22 | 67 | 15.38 | 335 | 3.48 |

| | | 268A+411_{—} | 268_+411A | | | |
|---|---|---|---|---|---|---|
| AA class | Variant | Synergistic**↑ | Measured | ↑ in IC₅₀* | Expected IC₅₀ | Synergistic**↑ |
| Aliphatic | Ala | 4.8 | 8.70 | 189 | 1.75 | 5.0 |
| Aliphatic | Ile | — | 12.45 | 271 | 1.61 | 7.8 |
| Aliphatic | Leu | 3.2 | 11.57 | 252 | 1.63 | 7.1 |
| Aliphatic | Val | 4.0 | 9.49 | 207 | 1.57 | 6.0 |
| Aromatic | Phe | 2.9 | 9.70 | 211 | 1.65 | 5.9 |
| Aromatic | Trp | 4.0 | 9.97 | 217 | 1.69 | 5.9 |
| Aromatic | Tyr | | 10.92 | 238 | 1.56 | 7.0 |
| Charged-Acidic | Asp | 5.0 | 14.41 | 314 | 1.73 | 8.3 |
| Charged-Acidic | Glu | 3.8 | 16.69 | 364 | 1.80 | 9.3 |
| Charged-Basic | Arg | 0.8 | 1.22 | 27 | 1.22 | 1.0 |
| Charged-Basic | His | 6.8 | 5.27 | 115 | 1.41 | 3.7 |
| Charged-Basic | Lys | 2.7 | 6.14 | 134 | 1.29 | 4.8 |
| Polar | Asn | | 13.28 | 289 | 1.66 | 8.0 |
| Polar | Gln | 4.5 | 9.13 | 199 | ND | |
| Polar | Ser | 5.4 | 9.57 | 209 | 1.67 | 5.7 |
| Polar | Thr | 4.6 | ND | | | |
| Special | Cys | 5.8 | 22.4 [symbol] | 490 | 1.56 | 14.4 |
| Special | Gly | 6.3 | 9.54 | 208 | 1.63 | 5.9 |
| Special | Met | 3.0 | 11.85 | 258 | | |
| Special | Pro | 7.1 | 8.57 | 187 | 1.70 | 5.1 |

| | | | | | |
|---|---|---|---|---|---|
| average | 4.4 | 10.58 | 230 | 1.59 | 6.5 |

[symbol]

indicates data missing or illegible when filed

TABLE 13

| | | 268_{—} | | | 411_{—} | | |
|---|---|---|---|---|---|---|---|
| AA class | Variant | Measured | Δ SA* | Std. Dev.* | Measured | Δ SA* | Std. Dev.* |
| Aliphatic | Ala | 2.97 | 3.9 | 0.29 | 0.52 | 0.7 | 0.12 |
| Aliphatic | Ile | 1.98 | 2.6 | 0.25 | ND | — | — |
| Aliphatic | Leu | 1.83 | 2.4 | 0.25 | 0.18 [symbol] | 0.2 | 0.11 [symbol] |
| Aliphatic | Val | 2.36 | 3.1 | 0.10 | 0.65 | 0.9 | 0.10 |
| Aromatic | Phe | 0.37 [symbol] | 0.5 | 0.32 [symbol] | 0.65 | 0.9 | 0.19 |
| Aromatic | Trp | 2.51 | 3.3 | 0.02 | 1.35 [symbol] | 1.8 | 1.19 [symbol] |
| Aromatic | Tyr | 1.25 | 1.6 | 0.03 | 0.82 | 1.1 | 0.10 |
| Charged-Acidic | Asp | 1.46 | 1.9 | 0.04 | 0.47 | 0.6 | 0.21 |
| Charged-Acidic | Glu | 1.84 | 2.4 | 0.17 | 0.28 [symbol] | 0.4 | 0.14 [symbol] |
| Charged-Basic | Arg | 0.97 | 1.3 | 0.04 | 0.83 | 1.1 | 0.05 |
| Charged-Basic | His | 1.72 | 2.3 | 0.63 | 0.80 | 1.0 | 0.18 |
| Charged-Basic | Lys | 3.34 | 4.4 | 0.42 | 0.80 | 1.0 | 0.03 |
| Polar | Asn | 1.56 | 2.1 | 0.07 | 0.15 [symbol] | 0.2 | 0.07 [symbol] |
| Polar | Gln | ND | — | — | −0.45 [symbol] | −0.6 | 0.57 [symbol] |
| Polar | Ser | 1.85 | 2.4 | 0.11 | 0.60 | 0.8 | 0.07 |
| Polar | Thr | 1.63 | 2.1 | 0.45 | 0.48 | 0.6 | 0.06 |
| Special | Cys | 1.81 | 2.4 | 0.13 | 0.92 | 1.2 | 0.04 |
| Special | Gly | 1.43 | 1.9 | 0.33 | 0.60 | 0.8 | 0.09 |
| Special | Met | ND | — | — | 0.57 | 0.7 | 0.09 |
| Special | Pro | 3.38 | 4.4 | 0.09 | 0.70 | 0.9 | 0.09 |
| Average | | 1.90 | 2.5 | | 0.6 | 0.8 | |
| | | 268A+411_{—} | | | 268_{—} +411 A | | |
| AA class | Variant | Measured | Δ SA* | Std. Dev.* | Measured | Δ SA* | Std. Dev.* |
| Aliphatic | Ala | 1.82 | 2.4 | 0.46 | 0.85 | 1.1 | 0.253 |
| Aliphatic | Ile | 0.35 [symbol] | 0.5 | 0.33 [symbol] | 1.15 | 1.5 | 0.18 |
| Aliphatic | Leu | 0.96 [symbol] | 1.3 | 0.67 [symbol] | 0.99 | 1.3 | 0.12 |
| Aliphatic | Val | 1.78 | 2.3 | 0.27 | 1.43 | 1.9 | 0.07 |
| Aromatic | Phe | 1.85 | 2.4 | 0.10 | 2.07 | 2.7 | 0.16 |
| Aromatic | Trp | 0.72 | 1.0 | 0.06 | 1.37 | 1.8 | 0.17 |
| Aromatic | Tyr | ND | — | — | 0.74 | 1.0 | 0.03 |
| Charged-Acidic | Asp | 2.21 | 2.9 | 0.32 | 0.52 [symbol] | 0.7 | 0.26 [symbol] |
| Charged-Acidic | Glu | 0.49 [symbol] | 0.6 | 0.35 [symbol] | 0.58 | 0.8 | 0.12 |
| Charged-Basic | Arg | 2.32 | 3.0 | 0.52 | 0.53 | 0.7 | 0.10 |
| Charged-Basic | His | 0.77 [symbol] | 1.0 | 0.68 [symbol] | 1.35 | 1.8 | 0.26 |
| Charged-Basic | Lys | 1.18 [symbol] | 1.5 | 0.44 [symbol] | 0.56 [symbol] | 0.7 | 0.67 [symbol] |
| Polar | Asn | ND | — | — | 0.84 | 1.1 | 0.20 |
| Polar | Gln | 1.22 | 1.6 | 0.31 | 2.13 | 2.8 | 0.18 |
| Polar | Ser | 2.19 | 2.9 | 0.60 | 1.59 | 2.1 | 0.03 |
| Polar | Thr | 1.78 | 2.3 | 0.27 | ND | — | — |
| Special | Cys | 1.85 | 2.4 | 0.20 | 0.16 [symbol] | 0.2 | 0.17 [symbol] |
| Special | Gly | 0.99 | 1.3 | 0.08 | 2.11 | 2.8 | 0.13 |
| Special | Met | 1.78 | 2.3 | 0.45 | 1.13 | 1.5 | 0.20 |
| Special | Pro | 1.90 | 2.5 | 0.07 | 2.16 | 2.8 | 0.24 |

| | | | | |
|---|---|---|---|---|
| Average | 1.5 | 1.7 | 1.2 | 1.5 |

[symbol]

indicates data missing or illegible when filed

TABLE 14

| Variant No. | R268 Substituent | R411 Substituent |
|---|---|---|
| 1. | A | A |
| 2. | C | A |
| 3. | D | A |
| 4. | E | A |
| 5. | F | A |
| 6. | G | A |
| 7. | H | A |
| 8. | I | A |
| 9. | K | A |
| 10. | L | A |
| 11. | M | A |
| 12. | N | A |
| 13. | P | A |
| 14. | Q | A |
| 15. | — | A |
| 16. | S | A |
| 17. | T | A |
| 18. | V | A |
| 19. | W | A |
| 20. | Y | A |
| 21. | A | C |
| 22. | C | C |
| 23. | D | C |
| 24. | E | C |
| 25. | F | C |
| 26. | G | C |
| 27. | H | C |
| 28. | I | C |
| 29. | K | C |
| 30. | L | C |
| 31. | M | C |
| 32. | N | C |
| 33. | P | C |
| 34. | Q | C |
| 35. | — | C |
| 36. | S | C |
| 37. | T | C |
| 38. | V | C |
| 39. | W | C |
| 40. | Y | C |
| 41. | A | D |
| 42. | C | D |
| 43. | D | D |
| 44. | E | D |
| 45. | F | D |
| 46. | G | D |
| 47. | H | D |
| 48. | I | D |
| 49. | K | D |
| 50. | L | D |
| 51. | M | D |
| 52. | N | D |
| 53. | P | D |
| 54. | Q | D |
| 55. | — | D |
| 56. | S | D |
| 57. | T | D |
| 58. | V | D |
| 59. | W | D |
| 60. | Y | D |
| 61. | A | E |
| 62. | C | E |
| 63. | D | E |
| 64. | E | E |
| 65. | F | E |
| 66. | G | E |
| 67. | H | E |
| 68. | I | E |
| 69. | K | E |
| 70. | L | E |
| 71. | M | E |
| 72. | N | E |
| 73. | P | E |
| 74. | Q | E |
| 75. | — | E |
| 76. | S | E |
| 77. | T | F |
| 78. | V | E |
| 79. | W | E |
| 80. | Y | E |
| 81. | A | F |
| 82. | C | F |
| 83. | D | F |
| 84. | E | F |
| 85. | F | F |
| 86. | G | F |
| 87. | H | F |
| 88. | I | F |
| 89. | K | F |
| 90. | L | F |
| 91. | M | F |
| 92. | N | F |
| 93. | P | F |
| 94. | Q | F |
| 95. | — | F |
| 96. | S | F |
| 97. | T | F |
| 98. | V | F |
| 99. | W | F |
| 100. | Y | F |
| 101. | A | G |
| 102. | C | G |
| 103. | D | G |
| 104. | E | G |
| 105. | F | G |
| 106. | G | G |
| 107. | H | G |
| 108. | I | G |
| 109. | K | G |
| 110. | L | G |
| 111. | M | G |
| 112. | N | G |
| 113. | P | G |
| 114. | Q | G |
| 115. | — | G |
| 116. | S | G |
| 117. | T | G |
| 118. | V | G |
| 119. | W | G |
| 120. | Y | G |
| 121. | A | H |
| 122. | C | H |
| 123. | D | H |
| 124. | E | H |
| 125. | F | H |
| 126. | G | H |
| 127. | H | H |
| 128. | I | H |
| 129. | K | H |
| 130. | L | H |
| 131. | M | H |
| 132. | N | H |
| 133. | P | H |
| 134. | Q | H |
| 135. | — | H |
| 136. | S | H |
| 137. | T | H |
| 138. | V | H |
| 139. | W | H |
| 140. | Y | H |
| 141. | A | I |
| 142. | C | I |
| 143. | D | I |
| 144. | E | I |
| 145. | F | I |
| 146. | G | I |
| 147. | H | I |
| 148. | I | I |
| 149. | K | I |
| 150. | L | I |
| 151. | M | I |
| 152. | N | I |
| 153. | P | I |
| 154. | Q | I |
| 155. | — | I |
| 156. | S | I |
| 157. | T | I |
| 158. | V | I |
| 159. | W | I |
| 160. | Y | I |
| 161. | A | K |
| 162. | C | K |
| 163. | D | K |
| 164. | E | K |
| 165. | F | K |
| 166. | G | K |
| 167. | H | K |
| 168. | I | K |
| 169. | K | K |
| 170. | L | K |
| 171. | M | K |
| 172. | N | K |
| 173. | P | K |
| 174. | Q | K |
| 175. | — | K |
| 176. | S | K |
| 177. | T | K |
| 178. | V | K |
| 179. | W | K |
| 180. | Y | K |
| 181. | A | L |
| 182. | C | L |
| 183. | D | L |
| 184. | E | L |
| 185. | F | L |
| 186. | G | L |
| 187. | H | L |
| 188. | I | L |
| 189. | K | L |
| 190. | L | L |
| 191. | M | L |
| 192. | N | L |
| 193. | P | L |
| 194. | Q | L |
| 195. | — | L |
| 196. | S | L |
| 197. | T | L |
| 198. | V | L |
| 199. | W | L |
| 200. | Y | L |
| 201. | A | M |
| 202. | C | M |
| 203. | D | M |
| 204. | E | M |
| 205. | F | M |
| 206. | G | M |
| 207. | H | M |
| 208. | I | M |
| 209. | K | M |
| 210. | L | M |
| 211. | M | M |
| 212. | N | M |
| 213. | P | M |
| 214. | Q | M |
| 215. | — | M |
| 216. | S | M |
| 217. | T | M |
| 218. | V | M |
| 219. | W | M |
| 220. | Y | M |
| 221. | A | N |
| 222. | C | N |
| 223. | D | N |
| 224. | E | N |
| 225. | F | N |
| 226. | G | N |
| 227. | H | N |
| 228. | I | N |
| 229. | K | N |
| 230. | L | N |
| 231. | M | N |
| 232. | N | N |
| 233. | P | N |
| 234. | Q | N |
| 235. | — | N |
| 236. | S | N |
| 237. | T | N |
| 238. | V | N |
| 239. | W | N |
| 240. | Y | N |
| 241. | A | P |
| 242. | C | P |
| 243. | D | P |
| 244. | E | P |
| 245. | F | P |
| 246. | G | P |
| 247. | H | P |
| 248. | I | P |
| 249. | K | P |
| 250. | L | P |
| 251. | M | P |
| 252. | N | P |
| 253. | P | P |
| 254. | Q | P |
| 255. | — | P |
| 256. | S | P |
| 257. | T | P |
| 258. | V | P |
| 259. | W | P |
| 260. | Y | P |
| 261. | A | Q |
| 262. | C | Q |
| 263. | D | Q |
| 264. | E | Q |
| 265. | F | Q |
| 266. | G | Q |
| 267. | H | Q |
| 268. | I | Q |
| 269. | K | Q |
| 270. | L | Q |
| 271. | M | Q |
| 272. | N | Q |
| 273. | P | Q |
| 274. | Q | Q |
| 275. | — | Q |
| 276. | S | Q |
| 277. | T | Q |
| 278. | V | Q |
| 279. | W | Q |
| 280. | Y | Q |
| 281. | A | — |
| 282. | C | — |
| 283. | D | — |
| 284. | E | — |
| 285. | F | — |
| 286. | G | — |
| 287. | H | — |
| 288. | I | — |
| 289. | K | — |
| 290. | L | — |
| 291. | M | — |
| 292. | N | — |
| 293. | P | — |
| 294. | Q | — |
| Wild Type | — | — |
| 295. | S | — |
| 296. | T | — |
| 297. | V | — |
| 298. | W | — |
| 299. | Y | — |
| 300. | A | S |
| 301. | C | S |
| 302. | D | S |
| 303. | E | S |
| 304. | F | S |
| 305. | G | S |
| 306. | H | S |
| 307. | I | S |
| 308. | K | S |
| 309. | L | S |
| 310. | M | S |
| 311. | N | S |
| 312. | P | S |
| 313. | Q | S |
| 314. | — | S |
| 315. | S | S |
| 316. | T | S |
| 317. | V | S |
| 318. | W | S |
| 319. | Y | S |
| 320. | A | T |
| 321. | C | T |
| 322. | D | T |
| 323. | E | T |
| 324. | F | T |
| 325. | G | T |
| 326. | H | T |
| 327. | I | T |
| 328. | K | T |
| 329. | L | T |
| 330. | M | T |
| 331. | N | T |
| 332. | P | T |
| 333. | Q | T |
| 334. | — | T |
| 335. | S | T |
| 336. | T | T |
| 337. | V | T |
| 338. | W | T |
| 339. | Y | T |
| 340. | A | V |
| 341. | C | V |
| 342. | D | V |
| 343. | E | V |
| 344. | F | V |
| 345. | G | V |
| 346. | H | V |
| 347. | I | V |
| 348. | K | V |
| 349. | L | V |
| 350. | M | V |
| 351. | N | V |
| 352. | P | V |
| 353. | Q | V |
| 354. | — | V |
| 355. | S | V |
| 356. | T | V |
| 357. | V | V |
| 358. | W | V |
| 359. | Y | V |
| 360. | A | W |
| 361. | C | W |
| 362. | D | W |
| 363. | E | W |
| 364. | F | W |
| 365. | G | W |
| 366. | H | W |
| 367. | I | W |
| 368. | K | W |
| 369. | L | W |
| 370. | M | W |
| 371. | N | W |
| 372. | P | W |
| 373. | Q | W |
| 374. | — | W |
| 375. | S | W |
| 376. | T | W |
| 377. | V | W |
| 378. | W | W |
| 379. | Y | W |
| 380. | A | Y |
| 381. | C | Y |
| 382. | D | Y |
| 383. | E | Y |
| 384. | F | Y |
| 385. | G | Y |
| 386. | H | Y |
| 387. | I | Y |
| 388. | K | Y |
| 389. | L | Y |
| 390. | M | Y |
| 391. | N | Y |
| 392. | P | Y |
| 393. | Q | Y |
| 394. | — | Y |
| 395. | S | Y |
| 396. | T | Y |
| 397. | V | Y |
| 398. | W | Y |
| 399. | Y | Y |

The application's sequence listing, which the Patent Office published only in electronic form, follows.

SEQUENCE LISTING (302 sequences)

SEQ ID NO: 1 - protein, 529 aa, Unknown
  Obtained from an Environmental Sample
MSALNSFNMYKSALILGSLLATAGAQQIGTYTAETHPSLSWSTCKSGGSCTTNSGAITLDANWRWVHGVNTSTNCYTGNTWNTAICDTDASCAQDCALDGADYSGTYGITTSGNSLRLNFVTGSNVGSRTYLMADNTHYQIFDLLNQEFTFTVDVSHLPCGLNGALYFVTMDADGGVSKYPNNKAGAQYGVGYCDSQCPRDLKFIAGQANVEGWTPSSNNANTGLGNHGACCAELDIWEANSISEALTPHPCDTPGLSVCTTDACGGTYSSDRYAGTCDPDGCDFNPYRLGVTDFYGSGKTVDTTKPITVVTQFVTDDGTSTGTLSEIRRYYVQNGVVIPQPSSKISGVSGNVINSDFCDAEISTFGETASFSKHGGLAKMGAGMEAGMVLVMSLWDDYSVNMLWLDSTYPTNATGTPGAARGSCPTTSGDPKTVESQSGSSYVTFSDIRVGPFNSTFSGGSSTGGSSTTTASGTTTTKASSTSTSSTSTGTGVAAHWGQCGGQGWTGPTTCASGTTCTVVNPYYSQCL

SEQ ID NO: 2 - protein, 514 aa, Trichoderma reesei
MYRKLAVISAFLATARAQSACTLQSETHPPLTWQKCSSGGTCTQQTGSVVIDANWRWTHATNSSTNCYDGNTWSSTLCPDNETCAKNCCLDGAAYASTYGVTTSGNSLSIGFVTQSAQKNVGARLYLMASDTTYQEFTLLGNEFSFDVDVSQLPCGLNGALYFVSMDADGGVSKYPTNTAGAKYGTGYCDSQCPRDLKFINGQANVEGWEPSSNNANTGIGGHGSCCSEMDIWEANSISEALTPHPCTTVGQEICEGDGCGGTYSDNRYGGTCDPDGCDWNPYRLGNTSFYGPGSSFTLDTTKKLTVVTQFETSGAINRYYVQNGVTFQQPNAELGSYSGNELNDDYCTAEEAEFGGSSFSDKGGLTQFKKATSGGMVLVMSLWDDYYANMLWLDSTYPTNETSSTPGAVRGSCSTSSGVPAQVESQSPNAKVTFSNIKFGPIGSTGNPSGGNPPGGNPPGTTTTRRPATTTGSSPGPTQSHYGQCGGIGYSGPTVCASGTTCQVLNPYYSQCL

SEQ ID NO: 3 - protein, 529 aa, Penicillium occitanis
MSALNSFNMYKSALILGSLLATAGAQQIGTYTAETHPSLSWSTCKSGGSCTTNSGAITLDANWRWVHGVNTSTNCYTGNTWNSAICDTDASCAQDCALDGADYSGTYGITTSGNSLRLNFVTGSNVGSRTYLMADNTHYQIFDLLNQEFTFTVDVSHLPCGLNGALYFVTMDADGGVSKYPNNKAGAQYGVGYCDSQCPRDLKFIAGQANVEGWTPSANNANTGIGNHGACCAELDIWEANSISEALTPHPCDTPGLSVCTTDACGGTYSSDRYAGTCDPDGCDFNPYRLGVTDFYGSGKTVDTTKPFTVVTQFVTNDGTSTGSLSEIRRYYVQNGVVIPQPSSKISGISGNVINSDYCAAEISTFGGTASFNKHGGLTNMAAGMEAGMVLVMSLWDDYAVNMLWLDSTYPTNATGTPGAARGTCATTSGDPKTVESQSGSSYVTFSDIRVGPFNSTFSGGSSTGGSTTTTASRTTTTSASSTSTSSTSTGTGVAGHWGQCGGQGWTGPTTCVSGTTCTVVNPYYSQCL

SEQ ID NO: 4 - protein, 434 aa, Trichoderma reesei
ESACTLQSETHPPLTWQKCSSGGTCTQQTGSVVIDANWRWTHATNSSTNCYDGNTWSSTLCPDNETCAKNCCLDGAAYASTYGVTTSGNSLSIDFVTQSAQKNVGARLYLMASDTTYQEFTLLGNEFSFDVDVSQLPCGLNGALYFVSMDADGGVSKYPTNTAGAKYGTGYCDSQCPRDLKFINGQANVEGWEPSSNNANTGIGGHGSCCSEMDIWQANSISEALTPHPCTTVGQEICEGDGCGGTYSDNRYGGTCDPDGCDWNPYRLGNTSFYGPGSSFTLDTTKKLTVVTQFETSGAINRYYVQNGVTFQQPNAELGSYSGNELNDDYCTAEEAEFGGSSFSDKGGLTQFKKATSGGMVLVMSLWDDYYANMLWLDSTYPTNETSSTPGAVRGSCSTSSGVPAQVESQSPNAKVTFSNIKFGPIGSTGNPSG

SEQ ID NO: 5 - protein, 526 aa, Aspergillus nidulans
MASSFQLYKALLFFSSLLSAVQAQKVGTQQAEVHPGLTWQTCTSSGSCTTVNGEVTIDANWRWLHTVNGYTNCYTGNEWDTSICTSNEVCAEQCAVDGANYASTYGITTSGSSLRLNFVTQSQQKNIGSRVYLMDDEDTYTMFYLLNKEFTFDVDVSELPCGLNGAVYFVSMDADGGKSRYATNEAGAKYGTGYCDSQCPRDLKFINGVANVEGWESSDTNPNGGVGNHGSCCAEMDIWEANSISTAFTPHPCDTPGQTLCTGDSCGGTYSNDRYGGTCDPDGCDFNSYRQGNKTFYGPGLTVDTNSPVTVVTQFLTDDNTDTGTLSEIKRFYVQNGVVIPNSESTYPANPGNSITTEFCESQKELFGDVDVFSAHGGMAGMGAALEQGMVLVLSLWDDNYSNMLWLDSNYPTDADPTQPGIARGTCPTDSGVPSEVEAQYPNAYVVYSNIKFGPIGSTFGNGGGSGPTTTVTTSTATSTTSSATSTATGQAQHWEQCGGNGWTGPTVCASPWACTVVNSWYSQCL

SEQ ID NO: 6 - protein, 512 aa, Gibberella zeae
MYRAIATASALIAAVRAQQVCSLTQESKPSLNWSKCTSSGCSNVKGSVTIDANWRWTHQVSGSTNCYTGNKWDTSVCTSGKVCAEKCCLDGADYASTYGITSSGDQLSLSFVTKGPYSTNIGSRTYLMEDENTYQMFQLLGNEFTFDVDVSNIGCGLNGALYFVSMDADGGKAKYPGNKAGAKYGTGYCDAQCPRDVKFINGQANSDGWQPSDSDVNGGIGNLGTCCPEMDIWEANSISTAYTPHPCTKLTQHSCTGDSCGGTYSNDRYGGTCDADGCDFNSYRQGNKTFYGPGSGFNVDTTKKVTVVTQFHKGSNGRLSEITRLYVQNGKVIANSESKIAGVPGNSLTADFCTKQKKVFNDPDDFTKKGAWSGMSDALEAPMVLVMSLWHDHHSNMLWLDSTYPTDSTKLGSQRGSCSTSSGVPADLEKNVPNSKVAFSNIKFGPIGSTYKSDGTTPTNPTNPSEPSNTANPNPGTVDQWGQCGGSNYSGPTACKSGFTCKKINDFYSQCQ

SEQ ID NO: 7 - protein, 532 aa, Aspergillus fumigatus
MLASTFSYRMYKTALILAALLGSGQAQQVGTSQAEVHPSMTWQSCTAGGSCTTNNGKVVIDANWRWVHKVGDYTNCYTGNTWDTTICPDDATCASNCALEGANYESTYGVTASGNSLRLNFVTTSQQKNIGSRLYMMKDDSTYEMFKLLNQEFTFDVDVSNLPCGLNGALYFVAMDADGGMSKYPTNKAGAKYGTGYCDSQCPRDLKFINGQANVEGWQPSSNDANAGTGNHGSCCAEMDIWEANSISTAFTPHPCDTPGQVMCTGDACGGTYSSDRYGGTCDPDGCDFNSFRQGNKTFYGPGMTVDTKSKFTVVTQFITDDGTSSGTLKEIKRFYVQNGKVIPNSESTWTGVSGNSITTEYCTAQKSLFQDQNVFEKHGGLEGMGAALAQGMVLVMSLWDDHSANMLWLDSNYPTTASSTTPGVARGTCDISSGVPADVEANHPDAYVVYSNIKVGPIGSTFNSGGSNPGGGTTTTTTTQPTTTTTTAGNPGGTGVAQHYGQCGGIGWTGPTTCASPYTCQKLNDYYSQCL

SEQ ID NO: 8 - protein, 539 aa, Aspergillus clavatus
MLPSTISYRIYKNALFFAALFGAVQAQKVGTSKAEVHPSMAWQTCAADGTCTTKNGKVVIDANWRWVHDVKGYTNCYTGNTWNAELCPDNESCAENCALEGADYAATYGATTSGNALSLKFVTQSQQKNIGSRLYMMKDDNTYETFKLLNQEFTFDVDVSNLPCGLNGALYFVSMDADGGLSRYTGNEAGAKYGTGYCDSQCPRDLKFINGLANVEGWTPSSSDANAGNGGHGSCCAEMDIWEANSISTAYTPHPCDTPGQAMCNGDSCGGTYSSDRYGGTCDPDGCDFNSYRQGNKSFYGPGMTVDTKKKMTVVTQFLTNDGTATGTLSEIKRFYVQDGKVIANSESTWPNLGGNSLTNDFCKAQKTVFGDMDTFSKHGGMEGMGAALAEGMVLVMSLWDDHNSNMLWLDSNSPTTGTSTTPGVARGSCDISSGDPKDLEANHPDASVVYSNIKVGPIGSTFNSGGSNPGGSTTTTKPATSTTTTKATTTATTNTTGPTGTGVAQPWAQCGGIGYSGPTQCAAPYTCTKQNDYYSQCL

SEQ ID NO: 9 - protein, 456 aa, Claviceps purpurea
MHPSLQTILLSALFTTAHAQQACSSKPETHPPLSWSRCSRSGCRSVQGAVTVDANWLWTTVDGSQNCYTGNRWDTSICSSEKTCSESCCIDGADYAGTYGVTTTGDALSLKFVQQGPYSKNVGSRLYLMKDESRYEMFTLLGNEFTFDVDVSKLGCGLNGALYFVSMDEDGGMKRFPMNKAGAKFGTGYCDSQCPRDVKFINGMANSKDWIPSKSDANAGIGSLGACCREMDIWEANNIASAFTPHPCKNSAYHSCTGDGCGGTYSKNRYSGDCDPDGCDFNSYRLGNTTFYGPGPKFTIDTTRKISVVTQFLKGRDGSLREIKRFYVQNGKVIPNSVSRVRGVPGNSITQGFCNAQKKMFGAHESFNAKGGMKGMSAAVSKPMVLVMSLWDDHNSNMLWLDSTYPTNSRQRGSKRGSCPASSGRPTDVESSAPDSTVVFSNIKFGPIGSTFSRGK

SEQ ID NO: 10 - protein, 431 aa, Phanerochaete chrysosporium
EQAGTNTAENHPQLQSQQCTTSGGCKPLSTKVVLDSNWRWVHSTSGYTNCYTGNEWDTSLCPDGKTCAANCALDGADYSGTYGITSTGTALTLKFVTGSNVGSRVYLMADDTHYQLLKLLNQEFTFDVDMSNLPCGLNGALYLSAMDADGGMSKYPGNKAGAKYGTGYCDSQCPKDIKFINGEANVGNWTETGSNTGTGSYGTCCSEMDIWEANNDAAAFTPHPCTTTGQTRCSGDDCARNTGLCDGDGCDFNSFRMGDKTFLGKGMTVDTSKPFTVVTQFLTNDNTSTGTLSEIRRIYIQNGKVIQNSVANIPGVDPVNSITDNFCAQQKTAFGDTNWFAQKGGLKQMGEALGNGMVLALSIWDDHAANMLWLDSDYPTDKDPSAPGVARGTCATTSGVPSDVESQVPNSQVVFSNIKFGDIGSTFSGTS

SEQ ID NO: 11 - protein, 452 aa, Neosartorya fischeri
MHQRALLFSALAVAANAQQVGTQKPETHPPLTWQKCTAAGSCSQQSGSVVIDANWRWLHSTKDTTNCYTGNTWNTELCPDNESCAQNCAVDGADYAGTYGVTTSGSELKLSFVTGANVGSRLYLMQDDETYQHFNLLNNEFTFDVDVSNLPCGLNGALYFVAMDADGGMSKYPSNKAGAKYGTGYCDSQCPRDLKFINGMANVEGWKPSSNDKNAGVGGHGSCCPEMDIWEANSISTAVTPHPCDDVSQTMCSGDACGGTYSATRYAGTCDPDGCDFNPFRMGNESFYGPGKIVDTKSEMTVVTQFITADGTDTGALSEIKRLYVQNGKVIANSVSNVADVSGNSISSDFCTAQKKAFGDEDIFAKHGGLSGMGKALSEMVLIMSIWDDHHSSMMWLDSTYPTDADPSKPGVARGTCEHGAGDPEKVESQHPDASVTFSNIKFGPIGSTYKA

SEQ ID NO: 12 - protein, 438 aa, Leptosphaeria maculans
MYRSLIFATSLLSLAKGQLVGNLYCKGSCTAKNGKVVIDANWRWLHVKGGYTNCYTGNEWNATACPDNKSCATNCAIDGADYRRLRHYCERQLLGTEVHHQGLYSTNIGSRTYLMQDDSTYQLFKFTGSQEFTFDVDLSNLPCGLNGALYFVSMDADGGLKKYPTNKAGAKYGTGYCDAQCPRDLKFINGEGNVEGWQPSKNDQNAGVGGHGSCCAEMDIWEANSVSTAVTPHSCSTIEQSRCDGDGCGGTYSADRYAGVCDPDGCDFNSYRMGVKDFYGKGKTVDTSKKFTVVTQFIGSGDAMEIKRFYVQNGKTIPQPDSTIPGVTGNSITTFFCDAQKKAFGDKYTFKDKGGMANMPSTCNGMVLVMSLWDDHYSNMLWLDSTYPTDKNPDTDAGSGRGECAITSGVPADVESQHPDASVIYSNIKFGPINTTFG

SEQ ID NO: 13 - protein, 521 aa, Neurospora crassa
MLAKFAALAALVASANAQAVCSLTAETHPSLNWSKCTSSGCTNVAGSITVDANWRWTHITSGSTNCYSGNEWDTSLCSTNTDCATKCCVDGAEYSSTYGIQTSGNSLSLQFVTKGSYSTNIGSRTYLMNGADAYQGFELLGNEFTFDVDVSGTGCGLNGALYFVSMDLDGGKAKYTNNKAGAKYGTGYCDAQCPRDLKYINGIANVEGWTPSTNDANAGIGDHGTCCSEMDIWEANKVSTAFTPHPCTTIEQHMCEGDSCGGTYSDDRYGGTCDADGCDFNSYRMGNTTFYGEGKTVDTSSKFTVVTQFIKDSAGDLAEIKRFYVQNGKVIENSQSNVDGVSGNSITQSFCNAQKTAFGDIDDFNKKGGLKQMGKALAKPMVLVMSIWDDHAANMLWLDSTYPVEGGPGAYRGECPTTSGVPAEVEANAPNSKVIFSNIKFGPIGSTFSGGSSGTPPSNPSSSVKPVTSTAKPSSTSTASNPSGTGAAHWAQCGGIGFSGPTTCQSPYTCQKINDYYSQCV

SEQ ID NO: 14 - protein, 460 aa, Coprinopsis cinerea okayama
MFKKVALTALCFLAVAQAQQVGREVAENHPRLPWQRCTRNGGCQTVSNGQVVLDANWRWLHVTDGYTNCYTGNSWNSTVCSDPTTCAQRCALEGANYQQTYGITTNGDALTIKFLTRSQQTNVGARVYLMENENRYQMFNLLNKEFTFDVDVSKVPCGINGALYFIQMDADGGMSKQPNNRAGAKYGTGYCDSQCPRDIKFIDGVANSADWTPSETDPNAGRGRYGICCAEMDIWEANSISNAYTPHPCRTQNDGGYQRCEGRDCNQPRYEGLCDPDGCDYNPFRMGNKDFYGPGKTVDTNRKMTVVTQFITHDNTDTGTLVDIRRLYVQDGRVIANPPTNFPGLMPAHDSITEQFCTDQKNLFGDYSSFARDGGLAHMGRSLAKGHVLALSIWNDHGAHMLWLDSNYPTDADPNKPGIARGTCPTTGGTPRETEQNHPDAQVIFSNIKFGDIGSTFSGY

SEQ ID NO: 15 - protein, 599 aa, Botryotinia fuckeliana
MYSAAVLATFSFLLGAGAQQVGTSTAETHPALTVQKCAAGGTCTDESDSIVLDANWRWLHSTSGSTNCYTGNTWDTTLCPDAATCTTNCALDGADYEGTYGITTSGDSLKLSFVTGSNVGSRTYLMDSETTYKEFALLGNEFTFTVDVSKLPCGLNGALYFVPMDADGGMSKYPTNKAGAKYGTGYCDAQCPQDMKFVNGTANVEGWVPDSNSANSGTGNIGSCCSEFDVWEANSMSQALTPHVCTVDSQTACTGDDCASNTGVCDGDGCDFNPYRMGNTTFYGSGMTIDTSKPFSVVTQFITDDGTETGTLTEIKRFYVQDDVVYEQPSSDISGVSGNSITDDFCAAQKTAFGDTDYFTQNGGMAAMGKKMADGMVLVLSIWDDYNVNMLWLDSDYPTTKDASTPGVSRGSCATDSGVPATVEAASGSAYVTFSSIKYGPIGSTFNAPADSSSSVSASSSPAPIASSSSSASIAPVSSVVAAIVSSSAQAISSAAPVVSSSAQAISSAAPVVSSVVSSAAPVATSSTKSKCSKVSSTLKTSVAAPATSATSAAVVATSSAASSTGSVPLYGNCTGGKTCSEGTCVVQNDYYSQCVASS

SEQ ID NO: 16 - protein, 433 aa, Phaeosphaeria nodorum
MTWQRCTGTGGSSCTNVNGEIVIDANWRWIHATGGYTNCFDGNEWNKTACPSNAACTKNCAIEGSDYRGTYGITTSGNSLTLKFITKGQYSTNVGSRTYLMKDTNNYEMFNLIGNEFTFDVDLSQLPCGLNGALYFVSMPEKGQGTPGAKYGTGKLSQCSVHISKTLTDACARDLKFVGGEANADGWQASTSDPNAGVGKKGACCAEMDVWEANSMSTALTPHSCQPEGYAVCEESNCGGTYSLDRYAGTCDANGCDFNPYRVGNKDFYGKGKTVDTSKKMTVVTQFLGTGSDLTELKRFYVQDGKVISNPEPTIPGMTGNSITQKWCDTQKEVFKEEVYPFNQWGGMASMGKGMAQGMVLVMSLWDDHYSNMLWLDSTYPTDRDPESPGAARGECAITSGAPAEVEANNPDASVMFSNIKFGPIGSTFQQPA

SEQ ID NO: 17 - protein, 451 aa, Humicola grisea
MQIKSYIQYLAAALPLLSSVAAQQAGTITAENHPRMTWKRCSGPGNCQTVQGEVVIDANWRWLHNNGQNCYEGNKWTSQCSSATDCAQRCALDGANYQSTYGASTSGDSLTLKFVTKHEYGTNIGSRFYLMANQNKYQMFTLMNNEFAFDVDLSKVECGINSALYFVAMEEDGGMASYPSNRAGAKYGTGYCDAQCARDLKFIGGKANIEGWRPSTNDPNAGVGPMGACCAEIDVWESNAYAYAFTPHACGSKNRYHICETNNCGGTYSDDRFAGYCDANGCDYNPYRMGNKDFYGKGKTVDTNRKFTVVSRFERNRLSQFFVQDGRKIEVPPPTWPGLPNSADITPELCDAQFRVFDDRNRFAETGGFDALNEALTIPMVLVMSIWDDHHSNMLWLDSSYPPEKAGLPGGDRGPCPTTSGVPAEVEAQYPNAQVVWSNIRFGPIGSTVNV

SEQ ID NO: 18 - protein, 525 aa, Humicola grisea
MRTAKFATLAALVASAAAQQACSLTTERHPSLSWKKCTAGGQCQTVQASITLDSNWRWTHQVSGSTNCYTGNKWDTSICTDAKSCAQNCCVDGADYTSTYGITTNGDSLSLKFVTKGQYSTNVGSRTYLMDGEDKYQTFELLGNEFTFDVDVSNIGCGLNGALYFVSMDADGGLSRYPGNKAGAKYGTGYCDAQCPRDIKFINGEANIEGWTGSTNDPNAGAGRYGTCCSEMDIWEANNMATAFTPHPCTIIGQSRCEGDSCGGTYSNERYAGVCDPDGCDFNSYRQGNKTFYGKGMTVDTTKKITVVTQFLKDANGDLGEIKRFYVQDGKIIPNSESTIPGVEGNSITQDWCDRQKVAFGDIDDFNRKGGMKQMGKALAGPMVLVMSIWDDHASNMLWLDSTFPVDAAGKPGAERGACPTTSGVPAEVEAEAPNSNVVFSNIRFGPIGSTVAGLPGAGNGGNNGGNPPPPTTTTSSAPATTTTASAGPKAGRWQQCGGIGFTGPTQCEEPYTCTKLNDWYSQCL

SEQ ID NO: 19 - protein, 451 aa, Chaetomium thermophilum
MQIKQYLQYLAAALPLVNMAAAQRAGTQQTETHPRLSWKRCSSGGNCQTVNAEIVIDANWRWLHDSNYQNCYDGNRWTSACSSATDCAQKCYLEGANYGSTYGVSTSGDALTLKFVTKHEYGTNIGSRVYLMNGSDKYQMFTLMNNEFAFDVDLSKVECGLNSALYFVAMEEDGGMRSYSSNKAGAKYGTGYCDAQCARDLKFVGGKANIEGWRPSTNDANAGVGPYGACCAEIDVWESNAYAFAFTPHGCLNNNYHVCETSNCGGTYSEDRFGGLCDANGCDYNPYRMGNKDFYGKGKTVDTSRKFTVVTRFEENKLTQFFIQDGRKIDIPPPTWPGLPNSSAITPELCTNLSKVFDDRDRYEETGGFRTINEALRIPMVLVMSIWDGHYANMLWLDSVYPPEKAGQPGAERGPCAPTSGVPAEVEAQFPNAQVIWSNIRFGPIGSTYQV

SEQ ID NO: 20 - protein, 530 aa, Chaetomium thermophilum
MMYKKFAALAALVAGAAAQQACSLTTETHPRLTWKRCTSGGNCSTVNGAVTIDANWRWTHTVSGSTNCYTGNEWDTSICSDGKSCAQTCCVDGADYSSTYGITTSGDSLNLKFVTKHQHGTNVGSRVYLMENDTKYQMFELLGNEFTFDVDVSNLGCGLNGALYFVSMDADGGMSKYSGNKAGAKYGTGYCDAQCPRDLKFINGEANIENWTPSTNDANAGFGRYGSCCSEMDIWDANNMATAFTPHPCTIIGQSRCEGNSCGGTYSSERYAGVCDPDGCDFNAYRQGDKTFYGKGMTVDTTKKMTVVTQFHKNSAGVLSEIKRFYVQDGKIIANAESKIPGNPGNSITQEWCDAQKVAFGDIDDFNRKGGMAQMSKALEGPMVLVMSVWDDHYANMLWLDSTYPIDKAGTPGAERGACPTTSGVPAEIEAQVPNSNVIFSNIRFGPIGSTVPGLDGSTPSNPTATVAPPTSTTTSVRSSTTQISTPTSQPGGCTTQKWGQCGGIGYTGCTNCVAGTTCTELNPWYSQCL

SEQ ID NO: 21 - protein, 419 aa, Phaeosphaeria nodorum
MYRNFLYAASLLSVARSQLVGTQTTETHPGMTWQSCTAKGSCTTCSDNKACASNCAVDGADYKGTYGITASGNSLQLKFITKGSYSTNIGSRTYLMASDTAYQMFKFDGNKEFTFDVDLSGLPCGFNGALYFVSMDEDGGLKKYSGNKAGAKYGTGYCDAQCPRDLKFINGEGNVEGWKPSDNDANAGVGGHGSCCAEMDIWEANSISTAVTPHACSTIEQTRCDGDGCGGTYSADRYAGVCDPDGCDFNAYRMGVKNFYGKGMTVDTSKKFTVVTQFIGTGDAMEIKRFYVQGGKTIEQPASTIPGVEGNSITTKFCDQQKQVFGDRYTYKEKGGTANMAKALAQGMVLVMSLWDDHYSNMLWLDSTYPTDKNPDTDLGSGRGSCDVKSGAPADVESKSPDATVIYSNIKFGPLNSTY

SEQ ID NO: 22 - protein, 460 aa, Coprinopsis cinerea okayama
MLGKIAIASLSFLAIAKGQQVGREVAENHPRLPWQRCTRNGGCQTVSNGQVVLDANWRWLHVTDGYTNCYTGNSWNSSVCSDGTTCAQRCALEGANYQQTYGITTSGNSLTMKFLTRSQGTNVGGRVYLMENENRYQMFNLLNKEFTFDVDVSKVPCGINGALYFIQMDADGGMSSQPNNRAGAKYGTGYCDSQCPRDIKFIDGVANSVGWEPSETDSNAGRGRYGICCAEMDIWEANSISNAYTPHPCRTQNDGGYQRCEGRDCNQPRYEGLCDPDGCDYNPFRMGNKDFYGPGKTIDTNRKMTVVTQFITHDNTDTGTLVDIRRLYVQDGRVIANPPTNFPGLMPAHDSITEQFCTDQKNLFGDYSSFARDGGLAHMGRSLAKGHVLALSIWNDHGAHMLWLDSNYPTDADPNKPGIARGTCPTTGGTPRETEQNHPDAQVIFSNIKFGDIGSTFSGY

SEQ ID NO: 23 - protein, 506 aa, Agaricus bisporus
MFPRSILLALSLTAVALGQQVGTNMAENHPSLTWQRCTSSGCQNVNGKVTLDANWRWTHRINDFTNCYTGNEWDTSICPDGVTCAENCALDGADYAGTYGVTSSGTALTLKFVTESQQKNIGSRLYLMADDSNYEIFNLLNKEFTFDVDVSKLPCGLNGALYFSEMAADGGMSSTNTAGAKYGTGYCDSQCPRDIKFIDGEANSEGWEGSPNDVNAGTGNFGACCGEMDIWEANSISSAYTPHPCREPGLQRCEGNTCSVNDRYATECDPDGCDFNSFRMGDKSFYGPGMTVDTNQPITVVTQFITDNGSDNGNLQEIRRIYVQNGQVIQNSNVNIPGIDSGNSISAEFCDQAKEAFGDERSFQDRGGLSGMGSALDRGMVLVLSIWDDHAVNMLWLDSDYPLDASPSQPGISRGTCSRDSGKPEDVEANAGGVQVVYSNIKFGDINSTFNNNGGGGGNPSPTTTRPNSPAQTMWGQCGGQGWTGPTACQSPSTCHVINDFYSQCF

SEQ ID NO: 24 - protein, 454 aa, Phaeosphaeria nodorum
MYRNLALASLSLFGAARAQQAGTVTTETHPSLSWKTCTGTGGTSCTTKAGKITLDANWRWTHVTTGYTNCYDGNSWNTTACPDGATCTKNCAVDGADYSGTYGITTSSNSLSIKFVTKGSNSANIGSRTYLMESDTKYQMFNLIGQEFTFDVDVSKLPCGLNGALYFVEMAADGGIGKGNNKAGAKYGTGYCDSQCPHDIKFINGKANVEGWNPSDADPNAGSGKIGACCPEMDIWEANSISTAYTPHPCKGTGLQECTDDVSCGDGSNRYSGLCDKDGCDFNSYRMGVKDFYGPGATLDTTKKMTVVTQFLGSGSTLSEIKRFYVQNGKVFKNSDSAIEGVTGNSITESFCAAQKTAFGDTNSFKTLGGLNEMGASLARGHVLVMSLWDDHAVNMLWLDSTYPTNSTKLGAQRGTCAIDSGKPEDVEKNHPDATVVFSDIKFGPIGSTFQQPS

SEQ ID NO: 25 - protein, 449 aa, Phanerochaete chrysosporium
MVDIQIATFLLLGVVGVAAQQVGTYIPENHPLLATQSCTASGGCTTSSSKIVLDANRRWIHSTLGTTSCLTANGWDPTLCPDGITCANYCALDGVSYSSTYGITTSGSALRLQFVTGTNIGSRVFLMADDTHYRTFQLLNQELAFDVDVSKLPCGLNGALYFVAMDADGGKSKYPGNRAGAKYGTGYCDSQCPRDVQFINGQANVQGWNATSATTGTGSYGSCCTELDIWEANSNAAALTPHTCTNNAQTRCSGSNCTSNTGFCDADGCDFNSFRLGNTTFLGAGMSVDTTKTFTVVTQFITSDNTSTGNLTEIRRFYVQNGNVIPNSVVNVTGIGAVNSITDPFCSQQKKAFIETNYFAQHGGLAQLGQALRTGMVLAFSISDDPANHMLWLDSNFPPSANPAVPGVARGMCSITSGNPADVGILNPSPYVSFLNIKFGSIGTTFRPA

SEQ ID NO: 26 - protein, 452 aa, Aspergillus fumigatus
MHQRALLFSALAVAANAQQVGTQTPETHPPLTWQKCTAAGSCSQQSGSVVIDANWRWLHSTKDTTNCYTGNTWNTELCPDNESCAQNCALDGADYAGTYGVTTSGSELKLSFVTGANVGSRLYLMQDDETYQHFNLLNHEFTFDVDVSNLPCGLNGALYFVAMDADGGMSKYPSNKAGAKYGTGYCDSQCPRDLKFINGMANVEGWEPSSSDKNAGVGGHGSCCPEMDIWEANSISTAVTPHPCDDVSQTMCSGDACGGTYSESRYAGTCDPDGCDFNPFRMGNESFYGPGKIVDTKSKMTVVTQFITADGTDSGALSEIKRLYVQNGKVIANSVSNVAGVSGNSITSDFCTAQKKAFGDEDIFAKHGGLSGMGKALSEMVLIMSIWDDHHSSMMWLDSTYPTDADPSKPGVARGTCEHGAGDPENVESQHPDASVTFSNIKFGPIGSTYEG

SEQ ID NO: 27 - protein, 516 aa, Phanerochaete chrysosporium
MFRTATLLAFTMAAMVFGQQVGTNTAENHRTLTSQKCTKSGGCSNLNTKIVLDANWRWLHSTSGYTNCYTGNQWDATLCPDGKTCAANCALDGADYTGTYGITASGSSLKLQFVTGSNVGSRVYLMADDTHYQMFQLLNQEFTFDVDMSNLPCGLNGALYLSAMDADGGMAKYPTNKAGAKYGTGYCDSQCPRDIKFINGEANVEGWNATSANAGTGNYGTCCTEMDIWEANNDAAAYTPHPCTTNAQTRCSGSDCTRDTGLCDADGCDFNSFRMGDQTFLGKGLTVDTSKPFTVVTQFITNDGTSAGTLTEIRRLYVQNGKVIQNSSVKIPGIDPVNSITDNFCSQQKTAFGDTNYFAQHGGLKQVGEALRTGMVLALSIWDDYAANMLWLDSNYPTNKDPSTPGVARGTCATTSGVPAQIEAQSPNAYVVFSNIKFGDLNTTYTGTVSSSSVSSSHSSTSTSSSHSSSSTPPTQPTGVTVPQWGQCGGIGYTGSTTCASPYTCHVLNPYYSQCY

SEQ ID NO: 28 - protein, 457 aa, Thermoascus aurantiacus
MYQRALLFSFFLAAARAHEAGTVTAENHPSLTWQQCSSGGSCTTQNGKVVIDANWRWVHTTSGYTNCYTGNTWDTSICPDDVTCAQNCALDGADYSGTYGVTTSGNALRLNFVTQSSGKNIGSRLYLLQDDTTYQIFKLLGQEFTFDVDVSNLPCGLNGALYFVAMDADGNLSKYPGNKAGAKYGTGYCDSQCPRDLKFINGQANVEGWQPSANDPNAGVGNHGSSCAEMDVWEANSISTAVTPHPCDTPGQTMCQGDDCGGTYSSTRYAGTCDPDGCDFNPYQPGNHSFYGPGKIVDTSSKFTVVTQFITDDGTPSGTLTEIKRFYVQNGKVIPQSESTISGVTGNSITTEYCTAQKAAFGDNTGFFTHGGLQKISQALAQGMVLVMSLWDDHAANMLWLDSTYPTDADPDTPGVARGTCPTTSGVPADVESQNPNSYVIYSNIKVGPINSTFTAN

SEQ ID NO: 29 - protein, 451 aa, Humicola grisea var thermoidea
MQIKSYIQYLAAALPLLSSVAAQQAGTITAENHPRMTWKRCSGPGNCQTVQGEVVIDANWRWLHNNGQNCYEGNKWTSQCSSATDCAQRCALDGANYQSTYGASTSGDSLTLKFVTKHEYGTNIGSRFYLMANQNKYQMFTLMNNEFAFDVDLSKVECGINSALYFVAMEEDGGMASYPSNRAGAKYGTGYCDAQCARDLKFIGGKANIEGWRPSTNDPNAGVGPMGACCAEIDVWESNAYAYAFTPHACGSKNRYHICETNNCGGTYSDDRFAGYCDANGCDYNPYRMGNKDFYGKGKTVDTNRKFTVVSRFERNRLSQFFVQDGRKIEVPPPTWPGLPNSADITPELCDAQFRVFDDRNRFAETGGFDALNEALTIPMVLVMSIWDDHHSNMLWLDSSYPPEKAGLPGGDRGPCPTTSGVPAEVEAQYPDAQVVWSNIRFGPIGSTVNV

SEQ ID NO: 30 - protein, 514 aa, Trichoderma viride
MYRKLAVISAFLATARAQSACTLQSETHPPLTWQKCSSGGTCTQQTGSVVIDANWRWTHATNSSTNCYDGNTWSSTLCPDNETCAKNCCLDGAAYASTYGVTTSGNSLSIGFVTQSAQKNVGARLYLMASDTTYQEFTLLGNEFSFDVDVSQLPCGLNGALYFVSMDADGGVSKYPTNTAGAKYGTGYCDSQCPRDLKFINGQANVEGWEPSSNNANTGIGGHGSCCSEMDIWEANSISEALTPHPCTTVGQEICEGDGCGGTYSDNRYGGTCDPDGCDWDPYRLGNTSFYGPGSSFTLDTTKKLTVVTQFETSGAINRYYVQNGVTFQQPNAELGSYSGNGLNDDYCTAEEAEFGGSSFSDKGGLTQFKKATSGGMVLVMSLWDDYYANMLWLDSTYPTNETSSTPGAVRGSCSTSSGVPAQVESQSPNAKVTFSNIKFGPIGSTGDPSGGNPPGGNPPGTTTTRRPATTTGSSPGPTQSHYGQCGGIGYSGPTVCASGTTCQVLNPYYSQCL

SEQ ID NO: 31 - protein, 457 aa, Thermoascus aurantiacus
MYQRALLFSFFLAAARAQQAGTVTAENHPSLTWQQCSSGGSCTTQNGKVVIDANWRWVHTTSGYTNCYTGNTWDTSICPDDVTCAQNCALDGADYSGTYGVTTSGNALRLNFVTQSSGKNIGSRLYLLQDDTTYQIFKLLGQEFTFDVDVSNLPCGLNGALYFVAMDADGGLSKYPGNKAGAKYGTGYCDSQCPRDLKFINGQANVEGWQPSANDPNAGVGNHGSCCAEMDVWEANSISTAVTPHPCDTPGQTMCQGDDCGGTYSSTRYAGTCDPDGCDFNPYRQGNHSFYGPGQIVDTSSKFTVVTQFITDDGTPSGTLTEIKRFYVQNGKVIPQSESTISGVTGNSITTEYCTAQKAAFGDNTGFFTHGGLQKISQALAQGMVLVMSLWDDHAANMLWLDSTYPTDADPDTPGVARGTCPTTSGVPADVESQYPNSYVIYSNIKVGPINSTFTAN

SEQ ID NO: 32 - protein, 453 aa, Magnaporthe grisea
MIRKITTLAALVGVVRGQAACSLTAETHPSLTWQKCSSGGSCTNVAGSVTIDANWRWTHTTSGYTNCYTGNKWDTSICSTNADCASKCCVDGANYQQTYGASTSGNALSLQYVTQSSGKNVGSRLYLLESENKYQMFNLLGNEFTFDVDASKLGCGLNGAVYFVSMDADGGQSKYSGNKAGAKYGTGYCDSQCPRDLKYINGAANVEGWQPSSGDANSGVGNMGSCCAEMDIWEANSISTAYTPHPCSNNAQHSCKGDDCGGTYSSVRYAGDCDPDGCDFNSYRQGNRTFYGPGSNFNVDSSKKVTVVTQFISSGGQLTDIKRFYVQNGKVIPNSQSTITGVTGNSVTQDYCDKQKTAFGDQNVFNQRGGLRQMGDALAKGMVLVMSVWDDHHSQMLWLDSTYPTTSTAPGAARGSCSTSSGKPSDVQSQTPGATVVYSNIKFGPIGSTFKSS

SEQ ID NO: 33 - protein, 455 aa, Talaromyces emersonii
MLRRALLLSSSAILAVKAQQAGTATAENHPPLTWQECTAPGSCTTQNGAVVLDANWRWVHDVNGYTNCYTGNTWDPTYCPDDETCAQNCALDGADYEGTYGVTSSGSSLKLNFVTGSNVGSRLYLLQDDSTYQIFKLLNREFSFDVDVSNLPCGLNGALYFVAMDADGGVSKYPNNKAGAKYGTGYCDSQCPRDLKFIDGEANVEGWQPSSNNANTGIGDHGSCCAEMDVWEANSISNAVTPHPCDTPGQTMCSGDDCGGTYSNDRYAGTCDPDGCDFNPYRMGNTSFYGPGKIIDTTKPFTVVTQFLTDDGTDTGTLSEIKRFYIQNSNVIPQPNSDISGVTGNSITTEFCTAQKQAFGDTDDFSQHGGLAKMGAAMQQGMVLVMSLWDDYAAQMLWLDSDYPTDADPTTPGIARGTCPTDSGVPSDVESQSPNSYVTYSNIKFGPINSTFTAS

SEQ ID NO: 34 - protein, 454 aa, Aspergillus oryzae
MHQRALLFSAFWTAVQAQQAGTLTAETHPSLTWQKCAAGGTCTEQKGSVVLDSNWRWLHSVDGSTNCYTGNTWDATLCPDNESCASNCALDGADYEGTYGVTTSGDALTLQFVTGANIGSRLYLMADDDESYQTFNLLNNEFTFDVDASKLPCGLNGAVYFVSMDADGGVAKYSTNKAGAKYGTGYCDSQCPRDLKFINGQVRKGWEPSDSDKNAGVGGHGSCCPQMDIWEANSISTAYTPHPCDDTAQTMCEGDTCGGTYSSERYAGTCDPDGCDFNAYRMGNESFYGPSKLVDSSSPVTVVTQFITADGTDSGALSEIKRFYVQGGKVIANAASNVDGVTGNSITADFCTAQKKAFGDDDIFAQHGGLQGMGNALSSMVLTLSIWDDHHSSMMWLDSSYPEDADATAPGVARGTCEPHAGDPEKVESQSGSATVTYSNIKYGPIGSTFDAPA

SEQ ID NO: 35 - protein, 529 aa, Penicillium chrysogenum
MASTLSFKIYKNALLLAAFLGAAQAQQVGTSTAEVHPSLTWQKCTAGGSCTSQSGKVVIDSNWRWVHNTGGYTNCYTGNDWDRTLCPDDVTCATNCALDGADYKGTYGVTASGSSLRLNFVTQASQKNIGSRLYLMADDSKYEMFQLLNQEFTFDVDVSNLPCGLNGALYFVAMDEDGGMARYPTNKAGAKYGTGYCDAQCPRDLKFINGQANVEGWEPSSSDVNGGTGNYGSCCAEMDIWEANSISTAFTPHPCDDPAQTRCTGDSCGGTYSSDRYGGTCDPDGCDFNPYRMGNQSFYGPSKIVDTESPFTVVTQFITNDGTSTGTLSEIKRFYVQNGKVIPQSVSTISAVTGNSITDSFCSAQKTAFKDTDVFAKHGGMAGMGAGLAEGMVLVMSLWDDHAANMLWLDSTYPTSASSTTPGAARGSCDISSGEPSDVEANHSNAYVVYSNIKVGPLGSTFGSTDSGSGTTTTKVTTTTATKTTTTTGPSTTGAAHYAQCGGQNWTGPTTCASPYTCQRQGDYYSQCL

SEQ ID NO: 36 - protein, 528 aa, Podospora anserina
MVSAKFAALAALVASASAQQVCSLTPESHPPLTWQRCSAGGSCTNVAGSVTLDSNWRWTHTLQGSTNCYSGNEWDTSICTTGTKCAQNCCVEGAEYAATYGITTSGNQLNLKFVTEGKYSTNVGSRTYLMENATKYQGFNLLGNEFTFDVDVSNIGCGLNGALYFVSMDLDGGLAKYSGNKAGAKYGTGYCDAQCPRDIKFINGEANIEGWNPSTNDVNAGAGRYGTCCSEMDIWEANNMATAYTPHSCTILDQSRCEGESCGGTYSSDRYGGVCDPDGCDFNSYRMGNKEFYGKGKTVDTTKKMTVVTQFLKNAAGELSEIKRFYVQNGVVIPNSVSSIPGVPNQNSITQDWCDAQKIAFGDPDDNTAKGGLRQMGLALDKPMVLVMSIWNDHAAHMLWLDSTYPVDAAGRPGAERGACPTTSGVPSEVEAEAPNSNVAFSNIKFGPIGSTFNSGSTNPNPISSSTATTPTSTRVSSTSTAAQTPTSAPGGTVPRWGQCGGQGYTGPTQCVAPYTCVVSNQWYSQCL

SEQ ID NO: 37 - protein, 458 aa, Pleurotus sp Florida
MFPYIALVSFSFLSVVLAQQVGTLTAETHPQLTVQQCTRGGSCTTQQRSVVLDGNWRWLHSTSGSNNCYTGNTWDTSLCPDAATCSRNCALDGADYSGTYGITSSGNALTLKFVTHGPYSTNIGSRVYLLADDSHYQMFNLKNKEFTFDVDVSQLPCGLNGALYFSQMDADGGTGRFPNNKAGAKYGTGYCDSQCPHDIKFINGEANVQGWQPSPNDSNAGKGQYGSCCAEMDIWEANSMASAYTPHPCTVTTPTRCQGNDCGDGDNRYGGVCDKDGCDFNSFRMGDKNFLGPGKTVNTNSKFTVVTQFLTSDNTTSGTLSEIRRLYVQNGRVIQNSKVNIPGMASTLDSITESFCSTQKTVFGDTNSFASKGGLRAMGNAFDKGMVLVLSIWDDHEAKMLWLDSNYPLDKSASAPGVARGTCATTSGEPKDVESQSPNAQVIFSNIKYGDIGSTYSN

SEQ ID NO: 38 - protein, 512 aa, Gibberella zeae
MYRAIATASALIAAVRAQQVCSLTQESKPSLNWSKCTSSGCSNVKGSVTIDANWRWTHQVSGSTNCYTGNKWDTSVCTSGKVCAERCCLDGADYASTYGITSSGDQLSLSFVTKGPYSTNIGSRTYLMEDENTYQMFQLLGNEFTFDVDVSNIGCGLNGALYFVSMDADGGKAKYPGNKAGAKYGTGYCDAQCPRDVKFINGQANSDGWQPSDSDVNGGIGNLGTCCPEMDIWEANSISTAYTPHPCTKLTQHSCTGDSCGGTYSNDRYGGTCDADGCDFNSYRQGNKTFYGPGSGFNVDTTKKVTVVTQFHKGSNGRLSEITRLYVQNGKVIANSESKIAGVPGNSLTADFCTKQKKVFNDPDDFTKKGAWSGMSDALEAPMVLVMSLWHDHHSNMLWLDSTYPTDSTKLGSQRGSCSTSSGVPADLEKNVPNSKVAFSNIKFGPIGSTYKSDGTTPTNPTNPSEPSNTANPNPGTVDQWGQCGGSNYSGPTACKSGFTCKKINDFYSQCQ

SEQ ID NO: 39 - protein, 589 aa, Sclerotinia sclerotiorum
MYSAAVLATFSFLLGAGAQQVGTLKTESHPPLTIQKCAAGGTCTDEADSVVLDANWRWLHSTSGSTNCYTGNTWDTTLCPDAATCTANCAFDGADYEGTYGITSSGDSLKLSFVTGSNVGSRTYLMDSETTYKEFALLGNEFTFTVDVSKLPCGLNGALYFVPMDADGGMSKYPTNKAGAKYGTGYCDAQCPQDMKFVSGGANNEGWVPDSNSANSGTGNIGSCCSEFDVWEANSMSQALTPHTCTVDGQTACTGDDCAGNTGVCDADGCDFNPYRMGNTTFYGSGKTIDTTKPFSVVTQFITDDGTETGTLTEIKRFYVQDDVVYEQPNSDISGVSGNSITDDFCTAQKTAFGDTDYFSQKGGMAAMGKKMADGMVLVLSIWDDYNVNMLWLDSDYPTTKDASTPGVSRGSCATTSGVPATVEAASGSAYVTFSSIKYGPIGSTFKAPADSSSPVVASSSPAAVAAVVSTSSAQAVPSHPAVSSSQAAVSTPEAVSSAPEVPASSSAAQSVAPTSTKPKCSKVSQSSTLATSVAAPATTATSAAVAATSAASSSGSVPLYGNCTGGKTCSEGTCVVQNPWYSQCVASS

SEQ ID NO: 40 - protein, 510 aa, Phanerochaete chrysosporium
MFRAAALLAFTCLAMVSGQQAGTNTAENHPQLQSQQCTTSGGCKPLSTKVVLDSNWRWVHSTSGYTNCYTGNEWDTSLCPDGKTCAANCALDGADYSGTYGITSTGTALTLKFVTGSNVGSRVYLMADDTHYQLLKLLNQEFTFDVDMSNLPCGLNGALYLSAMDADGGMSKYPGNKAGAKYGTGYCDSQCPKDIKFINGEANVGNWTETGSNTGTGSYGTCCSEMDIWEANNDAAAFTPHPCTTTGQTRCSGDDCARNTGLCDGDGCDFNSFRMGDKTFLGKGMTVDTSKPFTVVTQFLTNDNTSTGTLSEIRRIYIQNGKVIQNSVANIPGVDPVNSITDNFCAQQKTAFGDTNWFAQKGGLKQMGEALGNGMVLALSIWDDHAANMLWLDSDYPTDKDPSAPGVARGTCATTSGVPSDVESQVPNSQVVFSNIKFGDIGSTFSGTSSPNPPGGSTTSSPVTTSPTPPPTGPTVPQWGQCGGIGYSGSTTCASPYTCHVLNPYYSQCY

SEQ ID NO: 41 - protein, 513 aa, Trichoderma reesei
MYRKLAVISAFLATARAQSACTLQSETHPPLTWQKCSSGGTCTQQTGSVVIDANWRWTHATNSSTNCYDGNTWSSTLCPDNETCAKNCCLDGAAYASTYGVTTSGNSLSIGFVTQSAQKNVGARLYLMASDTTYQEFTLLGNEFSFDVDVSQLPCGLNGALYFVSMDADGGVSKYPTNTAGAKYGTGYCDSQCPRDLKFINGQANVEGWEPSSNNANTGIGGHGSCCSEMDIWEANSISEALTPHPCTTVGQEICEGDGCGGTYSDNRYGGTCDPDGCDWNPYRLGNTSFYGPGSSFTLDTTKKLTVVTQFETSGAINRYYVQNGVTFQQPNAELGSYSGNELNDDYCTAEEAEFGGSSFSDKGGLTQFKKATSGGMVLVMSLWDDYYANMLWLDSTYPTNETSSTPGAVRGSCSTSSGVPAQVESQSPNAKVTFSNIKFGPIGSTGNPSGGNPPGGNRGTTTTRRPATTTGSSPGPTQSHYGQCGGIGYSGPTVCASGTTCQVLNPYYSQCL

SEQ ID NO: 42 - protein, 541 aa, Aspergillus terreus
MPSTYDIYKKLLLLASFLSASQAQQVGTSKAEVHPSLTWQTCTSGGSCTTVNGKVVVDANWRWVHNVDGYNNCYTGNTWDTTLCPDDETCASNCALEGADYSGTYGVTTSGNSLRLNFVTQASQKNIGSRLYLMEDDSTYKMFKLLNQEFTFDVDVSNLPCGLNGAVYFVSMDADGGMAKYPANKAGAKYGTGYCDSQCPRDLKFINGMANVEGWEPSANDANAGTGNHGSCCAEMDIWEANSISTAYTPHPCDTPGQVMCTGDSCGGTYSSDRYGGTCDPDGCDFNSYRQGNKTFYGPGMTVDTKSKITVVTQFLTNDGTASGTLSEIKRFYVQNGKVIPNSESTWSGVSGNSITTAYCNAQKTLFGDTDVFTKHGGMEGMGAALAEGMVLVLSLWDDHNSNMLWLDSNYPTDKPSTTPGVARGSCDISSGDPKDVEANDANAYVVYSNIKVGPIGSTFSGSTGGGSSSSTTATSKTTTTSATKTTTTTTKTTTTTSASSTSTGGAQHWAQCGGIGWTGPTTCVAPYTCQKQNDYYSQCL

SEQ ID NO: 43 - protein, 516 aa, Botryotinia fuckeliana
MISKVLAFTSLLAAARAQQAGTLTTETHPPLSVSQCTASGCTTSAQSIVVDANWRWLHSTTGSTNCYTGNTWDKTLCPDGATCAANCALDGADYSGVYGITTSGNSIKLNFVTKGANTNVGSRTYLMAAGSTTQYQMLKLLNQEFTFDVDVSNLPCGLNGALYFAAMDADGGLSRFPTNKAGAKYGTGYCDAQCPQDIKFINGVANSVGWTPSSNDVNAGAGQYGSCCSEMDIWEANKISAAYTPHPCSVDTQTRCTGTDCGIGARYSSLCDADGCDFNSYRQGNTSFYGAGLTVNTNKVFTVVTQFITNDGTASGTLKEIRRFYVQNGVVIPNSQSTIAGVPGNSITDSFCAAQKTAFGDTNEFATKGGLATMSKALAKGMVLVMSIWDDHTANMLWLDAPYPATKSPSAPGVTRGSCSATSGNPVDVEANSPGSSVTFSNIKWGPINSTYTGSGAAPSVPGTTTVSSAPASTATSGAGGVAKYAQCGGSGYSGATACVSGSTCVALNPYYSQCQ

SEQ ID NO: 44 - protein, 458 aa, Volvariella volvacea
MFPAATLFAFSLFAAVYGQQVGTQLAETHPRLTWQKCTRSGGCQTQSNGAIVLDANWRWVHNVGGYTNCYTGNTWNTSLCPDGATCAKNCALDGANYQSTYGITTSGNALTLKFVTQSEQKNIGSRVYLLESDTKYQLFNPLNQEFTFDVDVSQLPCGLNGAVYFSAMDADGGMSKFPNNAAGAKYGTGYCDSQCPRDIKFINGEANVQGWQPSPNDTNAGTGNYGACCNEMDVWEANSISTAYTPHPCTQQGLVRCSGTACGGGSNRYGSICDPDGCDFNSFRMGDKSFYGPGLTVNTQQKFTVVTQFLTNNNSSSGTLREIRRLYVQNGRVIQNSKVNIPGMPSTMDSVTTEFCNAQKTAFNDTFSFQQKGGMANMSEALRRGMVLVLSIWDDHAANMLWLDSNYPTDRPASQPGVARGTCPTSSGKPSDVENSTANSQVIYSNIKFGDIGSTYSA

SEQ ID NO: 45 - protein, 537 aa, Penicillium janthinellum
  misc_feature (48)..(48): Xaa can be any naturally occurring amino acid
  misc_feature (64)..(64): Xaa can be any naturally occurring amino acid
MKGSISYQIYKGALLLSALLNSVSAQQVGTLTAETHPALTWSKCTAGXCSQVSGSVVIDANWPXVHSTSGSTNCYTGNTWDATLCPDDVTCAANCAVDGARRQHLRVTTSGNSLRINFVTTASQKNIGSRLYLLENDTTYQKFNLLNQEFTFDVDVSNLPCGLNGALYFVDMDADGGMAKYPTNKAGAKYGTGYCDSQCPRDLKFINGQANVDGWTPSKNDVNSGIGNHGSCCAEMDIWEANSISNAVTPHPCDTPSQTMCTGQRCGGTYSTDRYGGTCDPDGCDFNPYRMGVTNFYGPGETIDTKSPFTVVTQFLTNDGTSTGTLSEIKRFYVQGGKVIGNPQSTIVGVSGNSITDSWCNAQKSAFGDTNEFSKHGGMAGMGAGLADGMVLVMSLWDDHASDMLWLDSTYPTNATSTTPGAKRGTCDISRRPNTVESTYPNAYVIYSNIKTGPLNSTFTGGTTSSSSTTTTTSKSTSTSSSSKTTTTVTTTTTSSGSSGTGARDWAQCGGNGWTGPTTCVSPYTCTKQNDWYSQCL

SEQ ID NO: 46 - protein, 523 aa, Pleurotus sp Florida
MFRTAALTAFTLAAVVLGQQVGTLTAENHPALSIQQCTASGCTTQQKSVVLDSNWRWTHSLPVHTNCYTGNAWDASLCPDPTTCATNCAIDGADYSGTYGITTSGNALTLRFVTNGPYSKNIGSRVYLLDDADHYKMFDLKNQEFTFDVDMSGLPCGLNGALYFSEMPADGGKAAHTSNKAGAKYGTGYCDAQCPHDIKWINGEANILDWSASATDANAGNGRYGACCAEMDIWEANSEATAYTPHVCRDEGLYRCSGTECGDGDNRYGGVCDKDGCDFNSYRMGDKNFLGRGKTIDTTKKITVVTQFITDDNTSSGNLVEIRRVYVQDGVTYQNSFSTFPSLSQYNSISDDFCVAQKTLFGDNQYYNTHGGTEKMGDAMANGMVLIMSLWSDHAAHMLWLDSDYPLDKSPSEPGVSRGACATTTGDPDDVVANHPNASVTFSNIKYGPIGSTYGGSTPPVSSGNTSAPPVTSTTSSGPTTPTGPTGTVPKWGQCGGNGYSGPTTCVAGSTCTYSNDWYSQCL

SEQ ID NO: 47 - protein, 446 aa, Aspergillus nidulans
MYQRALLFSALLSVSRAQQAGTAQEEVHPSLTWQRCEASGSCTEVAGSVVLDSNWRWTHSVDGYTNCYTGNEWDATLCPDNESCAQNCAVDGADYEATYGITSNGDSLTLKFVTGSNVGSRVYLMEDDETYQMFDLLNNEFTFDVDVSNLPCGLNGALYFTSMDADGGLSKYEGNTAGAKYGTGYCDSQCPRDIKFINGLGNVEGWEPSDSDANAGVGGMGTCCPEMDIWEANSISTAYTPHPCDSVEQTMCEGDSCGGTYSDDRYGGTCDPDGCDFNSYRMGNTSFYGPGAIIDTSSKFTVVTQFIADGGSLSEIKRFYVQNGEVIPNSESNISGVEGNSITSEFCTAQKTAFGDEDIFAQHGGLSAMGDAASAMVLILSIWDDHHSSMMWLDSSYPTDADPSQPGVARGTCEQGAGDPDVVESEHADASVTFSNIKFGPIGSTF

SEQ ID NO: 48 - protein, 511 aa, Fusarium poae
MYRAIATASALIAAVRAQQVCSLTTETKPALTWSKCTSSGCSNVQGSVTIDANWRWTHQVSGSTNCHTGNKWDTSVCTSGKVCAEKCCVDGADYASTYGITSSGNQLSLSFVTKGSYGTNIGSRTYLMEDENTYQMFQLLGNEFTFDVDVSNIGCGLNGALYFVSMDADGGKAKYPGNKAGAKYGTGYCDAQCPRDVKFINGQANSDGWEPSKSDVNGGIGNLGTCCPEMDIWEANSISTAYTPHPCTKLTQHACTGDSCGGTYSNDRYGGTCDADGCDFNAYRQGNKTFYGPGSGFNVDTTKKVTVVTQFHKGSNGRLSEITRLYVQNGKVIANSESKIAGNPGSSLTSDFCTTQKKVFGDIDDFAKKGAWNGMSDALEAPMVLVMSLWHDHHSNMLWLDSTYPTDSTALGSQRGSCSTSSGVPADLEKNVPNSKVAFSNIKFGPIGSTYNKEGTQPQPTNPTNPNPTNPTNPGTVDQWGQCGGTNYSGPTACKSPFTCKKINDFYSQCQ

SEQ ID NO: 49 - protein, 523 aa, Pleurotus sp Florida
MFRTAALTAFTLAAVVLGQQVGTLAAENHPALSIQQCTASGCTTQQKSVVLDSNWRWTHSTAGATNCYTGNAWDSSLCPNPTTCATNCAIDGADYSGTYGITTSGNSLTLRFVTNGQYSENIGSRVYLLDDADHYKLFNLKNQEFTFDVDMSGLPCGLNGALYFSEMAADGGKAAHTGNNAGAKYGTGYCDAQCPHDIKWINGEANILDWSGSATDPNAGNGRYGACCAEMDIWEANSEATAYTPHVCRDEGLYRCSGTECGDGDNRYGGVCDKDGCDFNSYRMGDKNFLGRGKTIDTTKKITVVTQFITDDNTPTGNLVEIRRVYVQDGVTYQNSFSTFPSLSQYNSISDDFCVAQKTLFGDNQYYNTHGGTEKMGDSLANGMVLIMSLWSDHAAHMLWLDSDYPLDKSPSEPGVSRGACATTTGDPDDVVANHPNASVTFSNIKYGPIGSTYGGSTPPVSSGNTSVPPVTSTTSSGPTTPTGPTGTVPKWGQCGGIGYSGPTSCVAGSTCTYSNEWYSQCL

SEQ ID NO: 50 - protein, 513 aa, Trichoderma viride
MYQKLALISAFLATARAQSACTLQAETHPPLTWQKCSSGGTCTQQTGSVVIDANWRWTHATNSSTNCYDGNTWSSTLCPDNETCAKNCCLDGAAYASTYGVTTSADSLSIGFVTQSAQKNVGARLYLMASDTTYQEFTLLGNEFSFDVDVSQLPCGLNGALYFVSMDADGGVTKYPTNTAGAKYGTGYCDSQCPRDLKFINGQANVEGWEPSSNNANTGIGGHGSCCSEMDIWEANSISEALTPHPCTTVGQEICEGDSCGGTYSGDRYGGTCDPDGCDWNPYRLGNTSFYGPGSSFTLDTTKKLTVVTQFETSGAINRYYVQNGVTFQQPNAELGDYSGNSLDDDYCAAEEAEFGGSSFSDKGGLTQFKKATSGGMVLVMSLWDDYYANMLWLDSTYPTDETSSTPGAVRGSSSTSSGVPAQLESNSPNAKVVYSNIKFGPIGSTGNPSGGNPPGGNPPGTTTPRPATSTGSSPGPTQTHYGQCGGIGYIGPTVCASGSTCQVLNPYYSQCL

SEQ ID NO: 51 - protein, 423 aa, Alternaria alternata
MTWQSCTAKGSCTNKNGKIVIDANWRWLHKKEGYDNCYTGNEWDATACPDNKACAANCAVDGADYSGTYGITAGSNSLKLKFITKGSYSTNIGSRTYLMKDDTTYEMFKFTGNQEFTFDVDVSNLPCGFNGALYFVSMDADGGLKKYSTNKAGAKYGTGYCDAQCPRDLKFINGEGNVEGWKPSSNDANAGVGGHGSCCAEMDIWEANSVSTAVTPHSCSTIEQSRCDGDGCGGTYSADRYAGVCDPDGCDFNSYRMGVKDFYGKGKTVDTSKKFTVVTQFIGTGDAMEIKRFYVQNGKTIAQPASAVPGVEGNSITTKFCDQQKAVFGDTYTFKDKGGMANMAKALANGMVLVMSLWDDHYSNMLWLDSTYPTDKNPDTDLGTGRGECETSSGVPADVESQHADATVVYSNIKFGPLNSTFG

SEQ ID NO: 52 - protein, 535 aa, Neosartorya fischeri
MASAISFQVYRSALILSAFLPSITQAQQIGTYTTETHPSMTWETCTSGGSCATNQGSVVMDANWRWVHQVGSTTNCYTGNTWDTSICDTDETCATECAVDGADYESTYGVTTSGSQIRLNFVTQNSNGANVGSRLYMMADNTHYQMFKLLNQEFTFDVDVSNLPCGLNGALYFVTMDEDGGVSKYPNNKAGAQYGVGYCDSQCPRDLKFIQGQANVEGWTPSSNNENTGLGNYGSCCAELDIWESNSISQALTPHPCDTATNTMCTGDACGGTYSSDRYAGTCDPDGCDFNPYRMGNTTFYGPGKTIDTNSPFTVVTQFITDDGTDTGTLSEIRRYYVQNGVTYAQPDSDISGITGNAINADYCTAENTVFDGPGTFAKHGGFSAMSEAMSTGMVLVMSLWDDYYADMLWLDSTYPTNASSSTPGAVRGSCSTDSGVPATIESESPDSYVTYSNIKVGPIGSTFSSGSGSGSSGSGSSGSASTSTTSTKTTAATSTSTAVAQHYSQCGGQDWTGPTTCVSPYTCQVQNAYYSQCL

SEQ ID NO: 53 - protein, 450 aa, Neurospora crassa
MKAYFEYLVAALPLLGLATAQQVGKQTTETHPKLSWKKCTGKANCNTVNAEVVIDSNWRWLHDSSGKNCYDGNKWTSACSSATDCASKCQLDGANYGTTYGASTSGDALTLKFVTKHEYGTNIGSRFYLMNGASKYQMFTLMNNEFAFDVDLSTVECGLNAALYFVAMEEDGGMASYSSNKAGAKYGTGYCDAQCARDLKFVGGKANIEGWTPSTNDANAGVGPYGGCCAEIDVWESNAHSFAFTPHACKTNKYHVCERDNCGGTYSEDRFAGLCDANGCDYNPYRMGNTDFYGKGKTVDTSKKFTVVSRFEENKLTQFFVQNGQKIEIPGPKWDGIPSDNANITPEFCSAQFQAFGDRDRFAEVGGFAQLNSALRMPMVLVMSIWDDHYANMLWLDSVYPPEKEGQPGAARGDCPQSSGVPAEVESQYANSKVVYSNIRFGPVGSTVNV

SEQ ID NO: 54 - protein, 452 aa, Cryphonectria parasitica
MFSKFALTGSLLAGAVNAQGVGTQQTETHPQMTWQSCTSPSSCTTNQGEVVIDSNWRWVHDKDGYVNCYTGNTWNTTLCPDDKTCAANCVLDGADYSSTYGITTSGNALSLQFVTQSSGKNIGSRTYLMESSTKYHLFDLIGNEFAFDVDLSKLPCGLNGALYFVTMDADGGMAKYSTNTAGAEYGTGYCDSQCPRDLKFINGQGNVEGWTPSTNDANAGVGGLGSCCSEMDVWEANSMDMAYTPHPCETAAQHSCNADECGGTYSSSRYAGDCDPDGCDWNPFRMGNKDFYGSGDTVDTSQKFTVVTQFHGSGSSLTEISQYYIQGGTKIQQPNSTWPTLTGYNSITDDFCKAQKVEFNDTDVFSEKGGLAQMGAGMADGMVLVMSLWDDHYANMLWLDSTYPVDADASSPGKQRGTCATTSGVPADVESSDASATVIYSNIKFGPIGATY

SEQ ID NO: 55 - protein, 530 aa, Corticium rolfsii
MFPAAALLSFTLLAVASAQQIGTNTAEVHPSLTVSQCTTSGGCTSSTQSIVLDANWRWLHSTSGYTNCYTGNQWNSDLCPDPDTCATNCALDGASYESTYGISTDGNAVTLNFVTQGSQTNVGSRVYLLSDDTHYQTFSLLNKEFSFDVDASNIGCGINGAVYFVQMDADGGLSKYSSNKAGAQYGTGYCDSQCPQDIKFINGEANLLDWNATSANSGTGSYGSCCPEMDIWEANKYAAAYTPHPCSVSGQTRCTGTSCGAGSERYDGYCDKDGCDFNSWRMGNETFLGPGMTIDTNKKFTIVTQFITDDNTANGTLSEIRRLYVQGGTVIQNSVANQPNIPKVNSITDSFCTAQKTEFGDQDYFGTIGGLSQMGKAMSDMVLVMSIWDDYDAEMLWLDSNYPTSGSASTPGISRGPCSATSGLPATVESQQASASVTYSNIKWGDIGSTYSGSGSSGSSSSSSSSAASASTSTHTSAAATATSSAAAATGSPVPAYGQCGGQSYTGSTTCASPYVCKVSNAYYSQCLPA

SEQ ID NO: 56 - protein, 449 aa, Magnaporthe grisea
MKRALCASLSLLAAAVAQQVGTNEPEVHPKMTWKKCSSGGSCSTVNGEVVIDGNWRWIHNIGGYENCYSGNKWTSVCSTNADCATKCAMEGAKYQETYGVSTSGDALTLKFVQQNSSGKNVGSRMYLMNGANKYQMFTLKNNEFAFDVDLSSVECGMNSALYFVPMKEDGGMSTEPNNKAGAKYGTGYCDAQCARDLKFIGGKGNIEGWQPSSTDSSAGIGAQGACCAEIDIWESNKNAFAFTPHPCENNEYHVCTEPNCGGTYADDRYGGGCDANGCDYNPYRMGNPDFYGPGKTIDTNRKFTVISRFENNRNYQILMQDGVAHRIPGPKFDGLEGETGELNEQFCTDQFTVFDERNRFNEVGGWSKLNAAYEIPMVLVMSIWSDHFANMLWLDSTYPPEKAGQPGSARGPCPADGGDPNGVVNQYPNAKVIWSNVRFGPIGSTYQVD

SEQ ID NO: 57 - protein, 448 aa, Magnaporthe grisea
MQLTKAGVFLGALMGGAAAQQVGTQTAENHPKMTWKKCTGKASCTTVNGEVVIDANWRWLHDASSKNCYDGNRWTDSCRTASDCAAKCSLEGADYAKTYGASTSGDALSLKFVTRHDYGTNIGSRFYLMNGASKYQMFSLLGNEFAFDVDLSTIECGLNSALYFVAMEEDGGMKSYSSNKAGAKYGTGYCDAQCARDLKFVGGKANIEGWKPSSNDANAGVGPYGACCAEIDVWESNAHAFAFTPHPCTDNKYHVCQDSNCGGTYSDDRFAGKCDANGCDINPYRLGNTDFYGKGKTVDTSKKFTVVTRFERDALTQFFVQNNKRIDMPSPALEGLPATGAITAEYCTNVFNVFGDRNRFDEVGGWSQLQQALSLPMVLVMSIWDDHYSNMLWLDSVYPPDKEGSPGAARGDCPQDSGVPSEVESQIPGATVVWSNIRFGPVGSTVNV

SEQ ID NO: 58 - protein, 514 aa, Fusarium oxysporum
MYRIVATASALIAAARAQQVCSLNTETKPALTWSKCTSSGCSDVKGSVVIDANWRWTHQTSGSTNCYTGNKWDTSICTDGKTCAEKCCLDGADYSGTYGITSSGNQLSLGFVTNGPYSKNIGSRTYLMENENTYQMFQLLGNEFTFDVDVSGIGCGLNGAPHFVSMDEDGGKAKYSGNKAGAKYGTGYCDAQCPRDVKFINGVANSEGWKPSDSDVNAGVGNLGTCCPEMDIWEANSISTAFTPHPCTKLTQHSCTGDSCGGTYSSDRYGGTCDADGCDFNAYRQGNKTFYGPGSNFNIDTTKKMTVVTQFHKGSNGRLSEITRLYVQNGKVIANSESKIAGNPGSSLTSDFCSKQKSVFGDIDDFSKKGGWNGMSDALSAPMVLVMSLWHDHHSNMLWLDSTYPTDSTKVGSQRGSCATTSGKPSDLERDVPNSKVSFSNIKFGPIGSTYKSDGTTPNPPASSSTTGSSTPTNPPAGSVDQWGQCGGQNYSGPTTCKSPFTCKKINDFYSQCQ

SEQ ID NO: 59 - protein, 453 aa, Aspergillus clavatus
MYQRALLFSALATAVSAQQVGTQKAEVHPALTWQKCTAAGSCTDQKGSVVIDANWRWLHSTEDTTNCYTGNEWNAELCPDNEACAKNCALDGADYSGTYGVTADGSSLKLNFVTSANVGSRLYLMEDDETYQMFNLLNNEFTFDVDVSNLPCGLNGALYFVSMDADGGLSKYPGNKAGAKYGTGYCDSQCPRDLKFINGEANVEGWKPSDNDKNAGVGGYGSCCPEMDIWEANSISTAYTPHPCDGMEQTRCDGNDCGGTYSSTRYAGTCDPDGCDFNSFRMGNESFYGPGGLVDTKSPITVVTQFVTAGGTDSGALKEIRRVYVQGGKVIGNSASNVAGVEGDSITSDFCTAQKKAFGDEDIFSKHGGLEGMGKALNKMALIVSIWDDHASSMMWLDSTYPVDADASTPGVARGTCEHGLGDPETVESQHPDASVTFSNIKFGPIGSTYKSV

SEQ ID NO: 60 - protein, 529 aa, Penicillium funiculosum
MSALNSFNMYKSALILGSLLATAGAQQIGTYTAETHPSLSWSTCKSGGSCTTNSGAITLDANWRWVHGVNTSTNCYTGNTWNTAICDTDASCAQDCALDGADYSGTYGITTSGNSLRLNFVTGSNVGSRTYLMADNTHYQIFDLLNQEFTFTVDVSNLPCGLNGALYFVTMDADGGVSKYPNNKAGAQYGVGYCDSQCPRDLKFIAGQANVEGWTPSTNNSNTGIGNHGSCCAELDIWEANSISEALTPHPCDTPGLTVCTADDCGGTYSSNRYAGTCDPDGCDFNPYRLGVTDFYGSGKTVDTTKPFTVVTQFVTDDGTSSGSLSEIRRYYVQNGVVIPQPSSKISGISGNVINSDFCAAELSAFGETASFTNHGGLKNMGSALEAGMVLVMSLWDDYSVNMLWLDSTYPANETGTPGAARGSCPTTSGNPKTVESQSGSSYVVFSDIKVGPFNSTFSGGTSTGGSTTTTASGTTSTKASTTSTSSTSTGTGVAAHWGQCGGQGWTGPTTCASGTTCTVVNPYYSQCL

SEQ ID NO: 61 - protein, 525 aa, Humicola grisea var thermoidea
MRTAKFATLAALVASAAAQQACSLTTERHPSLSWNKCTAGGQCQTVQASITLDSNWRWTHQVSGSTNCYTGNKWDTSICTDAKSCAQNCCVDGADYTSTYGITTNGDSLSLKFVTKGQHSTNVGSRTYLMDGEDKYQTFELLGNEFTFDVDVSNIGCGLNGALYFVSMDADGGLSRYPGNKAGAKYGTGYCDAQCPRDIKFINGEANIEGWTGSTNDPNAGAGRYGTCCSEMDIWEANNMATAFTPHPCTIIGQSRCEGDSCGGTYSNERYAGVCDPDGCDFNSYRQGNKTFYGKGMTVDTTKKITVVTQFLKDANGDLGEIKRFYVQDGKIIPNSESTIPGVEGNSITQDWCDRQKVAFGDIDDFNRKGGMKQMGKALAGPMVLVMSIWDDHASNMLWLDSTFPVDAAGKPGAERGACPTTSGVPAEVEAEAPNSNVVFSNIRFGPIGSTVAGLPGAGNGGNNGGNPPPPTTTTSSAPATTTTASAGPKAGRWQQCGGIGFTGPTQCEEPYICTKLNDWYSQCL

SEQ ID NO: 62 - protein, 532 aa, Chaetomium thermophilum
MMYKKFAALAALVAGASAQQACSLTAENHPSLTWKRCTSGGSCSTVNGAVTIDANWRWTHTVSGSTNCYTGNQWDTSLCTDGKSCAQTCCVDGADYSSTYGITTSGDSLNLKFVTKHQYGTNVGSRVYLMENDTKYQMFELLGNEFTFDVDVSNLGCGLNGALYFVSMDADGGMSKYSGNKAGAKYGTGYCDAQCPRDLKFINGEANVGNWTPSTNDANAGFGRYGSCCSEMDVWEANNMATAFTPHPCTTVGQSRCEADTCGGTYSSDRYAGVCDPDGCDFNAYRQGDKTFYGKGMTVDTNKKMTVVTQFHKNSAGVLSEIKRFYVQDGKIIANAESKIPGNPGNSITQEYCDAQKVAFSNTDDFNRKGGMAQMSKALAGPMVLVMSVWDDHYANMLWLDSTYPIDQAGAPGAERGACPTTSGVPAEIEAQVPNSNVIFSNIRFGPIGSTVPGLDGSNPGNPTTTVVPPASTSTSRPTSSTSSPVSTPTGQPGGCTTQKWGQCGGIGYTGCTNCVAGTTCTQLNPWYSQCL

SEQ ID NO: 63 - protein, 465 aa, Aspergillus oryzae
MASLSLSKICRNALILSSVLSTAQGQQVGTYQTETHPSMTWQTCGNGGSCSTNQGSVVLDANWRWVHQTGSSSNCYTGNKWDTSYCSTNDACAQKCALDGADYSNTYGITTSGSEVRLNFVTSNSNGKNVGSRVYMMADDTHYEVYKLLNQEFTFDVDVSKLPCGLNGALYFVVMDADGGVSKYPNNKAGAKYGTGYCDSQCPRDLKFIQGQANVEGWVSSTNNANTGTGNHGSCCAELDIWESNSISQALTPHPCDTPTNTLCTGDACGGTYSSDRYSGTCDPDGCDFNPYRVGNTTFYGPGKTIDTNKPITVVTQFITDDGTSSGTLSEIKRFYVQDGVTYPQPSADVSGLSGNTINSEYCTAENTLFEGSGSFAKHGGLAGMGEAMSTGMVLVMSLWDDYYANMLWLDSNYPTNESTSKPGVARGTCSTSSGVPSEVEASNPSAYVAYSNIKVGPIGSTFKS

SEQ ID NO: 64 - protein, 510 aa, Gibberella pulicaris
MYRAIATASALIAAVRAQQVCSLTPETKPALSWSKCTSSGCSNVQGSVTIDANWRWTHQLSGSTNCYTGNKWDTSICTSGKVCAEKCCIDGAEYASTYGITSSGNQLSLSFVTKGAYGTNIGSRTYLMEDENTYQMFQLLGNEFTFDVDVSNIGCGLNGALYFVSMDADGGKAKYPGNKAGAKYGTGYCDAQCPRDVKFINGQANSDGWQPSKSDVNAGIGNMGTCCPEMDIWEANSISTAYTPHPCTKLTQHSCTGDSCGGTYSNDRYGGTCDADGCDFNAYRQGNKTFYGPGSGFNVDTTKKVTVVTQFHKGSNGRLSEITRLYVQNGKVIANSESKIAGVPGSSLTPEFCTAQKKVFGDTDDFAKKGAWSGMSDALEAPMVLVMSLWHDHHSNMLWLDSTYPTDSTKLGAQRGSCSTSSGVPADLEKNVPNSKVAFSNIKFGPIGSTYKEGVPEPTNPTNPTNPTNPTNPGTVDQWAQCGGTNYSGPTACKSPFTCKKINDFYSQCQ

SEQ ID NO: 65 - protein, 512 aa, Volvariella volvacea
MFPKSSLLVLSFLATAYAQQVGTQTAEVHPSLNWARCTSSGCTNVAGSVTLDANWRWLHTTSGYTNCYTGNSWNTTLCPDGATCAQNCALDGANYQSTCGITTSGNALTLKFVTQGEQKNIGSRVYLMASESRYEMFGLLNKEFTFDVDVSNLPCGLNGALYFSSMDADGGMAKNPGNKAGAKYGTGYCDSQCPRDIKFINGEANVAGWNGSPNDTNAGTGNWGACCNEMDIWEANSISAAYTPHPCTVQGLSRCSGTACGTNDRYGTVCDPDGCDFNSYRMGDKTYYGPGGTGVDTRSKFTVVTQFLTNNNSSSGTLSEIRRLYVQNGRVVQNSKVNIPGMSNTLDSITTGFCDSQKTAFGDTRSFQNKGGMSAMGQALGAGMVLVLSVWDDHAANMLWLDSNYPVDADPSKPGIARGTCSTTSGKPTDVEQSAANSSVTFSNIKFGDIGTTYTGGSVTTTPGNPGTTTSTAPGAVQTKWGQCGGQGWTGPTRCESGSTCTVVNQWYSQCI

SEQ ID NO: 66 - protein, 521 aa, Irpex lacteus
MFRKAALLAFSFLAIAHGQQVGTNQAENHPSLPSQHCTASGCTTSSTSVVLDANWRWVHTTTGYTNCYTGQTWDASICPDGVTCAKACALDGADYSGTYGITTSGNALTLQFVKGTNVGSRVYLLQDASNYQLFKLINQEFTFDVDMSNLPCGLNGAVYLSQMDQDGGVSRFPTNTAGAKYGTGYCDSQCPRDIKFINGEANVAGWTGSSSDPNSGTGNYGTCCSEMDIWEANSVAAAYTPHPCSVNQQTRCTGADCGQDANRYKGVCDPDGCDFNSFRMGDQTFLGKGLTVDTSRKFTIVTQFISDDGTSSGNLAEIRRFYVQDGKVIPNSKVNIAGCDAVNSITDKFCTQQKTAFGDTNRFADQGGLKQMGAALKSGMVLALSLWDDHAANMLWLDSDYPTTADASKPGVARGTCPNTSGVPKDVESQSGSATVTYSNIKWGDLNSTFSGTASNPTGPSSSPSGPSSSSSSTAGSQPTQPSSGSVAQWGQCGGIGYSGATGCVSPYTCHVVNPYYSQCY

SEQ ID NO: 67 - protein, 505 aa, Chaetomium thermophilum var thermophilum
TETHPRLTWKRCTSGGNCSTVNGAVTIDANWRWTHTVSGSTNCYTGNEWDTSICSDGKSCAQTCCVDGADYSSTYGITTSGDSLNLKFVTKHQHGTNVGSRVYLMENDTKYQMFELLGNEFTFDVDVSNLGCGLNGALYFVSMDADGGMSKYSGNKAGAKYGTGYCDAQCPRDLKFINGEANIENWTPSTNDANAGFGRYGSCCSEMDIWEANNMATAFTPHPCTIIGQSRCEGNSCGGTYSSERYAGVCDPDGCDFNAYRQGDKTFYGKGMTVDTTKKMTVVTQFHKNSAGVLSEIKRFYVQDGKIIANAESKIPGNPGNSITQEWCDAQKVAFGDIDDFNRKGGMAQMSKALEGPMVLVMSVWDDHYANMLWLDSTYPIDKAGTPGAERGACPTTSGVPAEIEAQVPNSNVIFSNIRFGPIGSTVPGLDGSTPSNPTATVAPPTSTTTSVRSSTTQISTPTSQPGGCTTQKWGQCGGIGYTGCTNCVAGTTCTELNPWYSQCL

SEQ ID NO: 68 - protein, 526 aa, Irpex lacteus
MFHKAVLVAFSLVTIVHGQQAGTQTAENHPQLSSQKCTAGGSCTSASTSVVLDSNWRWVHTTSGYTNCYTGNTWDASICSDPVSCAQNCALDGADYAGTYGITTSGDALTLKFVTGSNVGSRVYLMEDETNYQMFKLMNQEFTFDVDVSNLPCGLNGAVYFVQMDQDGGTSKFPNNKAGAKFGTGYCDSQCPQDIKFINGEANIVDWTASAGDANSGTGSFGTCCQEMDIWEANSISAAYTPHPCTVTEQTRCSGSDCGQGSDRFNGICDPDGCDFNSFRMGNTEFYGKGLTVDTSQKFTIVTQFISDDGTADGNLAEIRRFYVQNGKVIPNSVVQITGIDPVNSITEDFCTQQKTVFGDTNNFAAKGGLKQMGEAVKNGMVLALSLWDDYAAQMLWLDSDYPTTADPSQPGVARGTCPTTSGVPSQVEGQEGSSSVIYSNIKFGDLNSTFTGTLTNPSSPAGPPVTSSPSEPSQSTQPSQPAQPTQPAGTAAQWAQCGGMGFTGPTVCASPFTCHVLNPYYSQCY

SEQ ID NO: 69 - protein, 511 aa, Phanerochaete chrysosporium
MFRAAALLAFTCLAMVSGQQAGTNTAENHPQLQSQQCTTSGGCKPLSTKVVLDSNWRWVHSTSGYTNCYTGNEWNTSLCPDGKTCAANCALDGADYSGTYGITSTGTALTLKFVTGSNVGSRVYLMADDTHYQLLKLLNQEFTFDVDMSNLPCGLNGALYLSAMDADGGMSKYPGNKAGAKYGTGYCDSQCPKDIKFINGEANVGNWTETGSNTGTGSYGTCCSEMDIWEANNDAAAFTPHPCTTTGQTRCSGDDCARNTGLCDHGDGCDFNSFRMGDKTFLGKGMTVDTSKPFTDVTQFLTNDNTSTGTLSEIRRIYIQNGKVIQNSVANIPGVDPVNSITDNFCAQQKTAFGDTNWFAQKGGLKQMGEALGNGMVLALSIWDDHAANMLWLDSDYPTDKDPSAPGVARGTCATTSGVPSDVESQVPNSQVVFSNIKFGDIGSTFSGTSSPNPPGGSTTSSPVTTSPTPPPTGPTVPQWGQCGGIGYSGSTTCASPYTCHVLNPYYSQCY

SEQ ID NO: 70 - protein, 452 aa, Melanocarpus albomyces
MMMKQYLQYLAAALPLVGLAAGQRAGNETPENHPPLTWQRCTAPGNCQTVNAEVVIDANWRWLHDDNMQNCYDGNQWTNACSTATDCAEKCMIEGAGDYLGTYGASTSGDALTLKFVTKHEYGTNVGSRFYLMNGPDKYQMFNLMGNELAFDVDLSTVECGINSALYFVAMEEDGGMASYPSNQAGARYGTGYCDAQCARDLKFVGGKANIEGWKSSTSDPNAGVGPYGSCCAEIDVWESNAYAFAFTPHACTTNEYHVCETTNCGGTYSEDRFAGKCDANGCDYNPYRMGNPDFYGKGKTLDTSRKFTVVSRFEENKLSQYFIQDGRKIEIPPPTWEGMPNSSEITPELCSTMFDVFNDRNRFEEVGGFEQLNNALRVPMVLVMSIWDDHYANMLWLDSIYPPEKEGQPGAARGDCPTDSGVPAEVEAQFPDAQVVWSNIRFGPIGSTYDF

SEQ ID NO: 71 - protein, 454 aa, Podospora anserina
MYRSATFLTFASLVLGQQVGTYTAERHPSMPIQVCTAPGQCTRESTEVVLDANWRWTHITNGYTNCYTGNEWNATACPDGATCAKNCAVDGADYSGTYGITTPSSGALRLQFVKKNDNGQNVGSRVYLMASSDKYKLFNLLNKEFTFDVDVSKLPCGLNGAVYFSEMLEDGGLKSFSGNKAGAKYGTGYCDSQCPQDIKFINGEANVEGWGGADGNSGTGKYGICCAEMDIWEANSDATAYTPHVCSVNEQTRCEGVDCGAGSDRYNSICDKDGCDFNSYRLGNREFYGPGKTVDTTRPFTIVTQFVTDDGTDSGNLKSIHRYYVQDGNVIPNSVTEVAGVDQTNFISEGFCEQQKSAFGDNNYFGQLGGMRAMGESLKKMVLVLSIWDDHAVNMNWLDSIFPNDADPEQPGVARGRCDPADGVPATIEAAHPDAYVIYSNIKFGAINSTFTAN

SEQ ID NO: 72 - protein, 456 aa, Cochliobolus carbonum
MYRTLAFASLSLYGAARAQQVGTSTAENHPKLTWQTCTGTGGTNCSNKSGSVVLDSNWRWAHNVGGYTNCYTGNSWSTQYCPDGDSCTKNCAIDGADYSGTYGITTSNNALSLKFVTKGSFSSNIGSRTYLMETDTKYQMFNLINKEFTFDVDVSKLPCGLNGALYFVEMAADGGIGKGNNKAGAKYGTGYCDSQCPHDIKFINGKANVEGWNPSDADPNGGAGKIGACCPEMDIWEANSISTAYTPHPCRGVGLQECSDAASCGDGSNRYDGQCDKDGCDFNSYRMGVKDFYGPGATLDTTKKMTVITQFLGSGSSLSEIKRFYVQNGKVYKNSQSAVAGVTGNSITESFCTAQKKAFGDTSSFAALGGLNEMGASLARGHVLIMSLWGDHAVNMLWLDSTYPTDADPSKPGAARGTCPTTSGKPEDVEKNSPDATVVFSNIKFGPIGSTFAQPA

SEQ ID NO: 73 - protein, 514 aa, Trichoderma viride
MYQKLALISAFLATARAQSACTLQAETHPPLTWQKCSSGGTCTQQTGSVVIDANWRWTHATNSSTNCYDGNTWSSTLCPDNETCAKNCCLDGAAYASTYGVTTSADSLSIGFVTQSAQKNVGARLYLMASDTTYQEFTLLGNEFSFDVDVSQLPCGLNGALYFVSMDADGGVSKYPTNTAGAKYGTGYCDSQCPRDLKFINGQANVEGWEPSSNNANTGIGGHGSCCSEMDIWEANSISEALTPHPCTTVGQEICDGDSCGGTYSGDRYGGTCDPDGCDWNPYRLGNTSFYGPGSSFTLDTTKKLTVVTQFETSGAINRYYVQNGVTFQQPNAELGDYSGNSLDDDYCAAEEAEFGGSSFSDKGGLTQFKKATSGGMVLVMSLWDDYYANMLWLDSTYPTNETSSTPGAVRGSCSTSSGVPAQLESNSPNAKVVYSNIKFGPIGSTGNSSGGNPPGGNPPGTTTTRRPATSTGSSPGPTQTHYGQCGGIGYSGPTVCASGSTCQVLNPYYSQCL

SEQ ID NO: 74 - protein, 540 aa, Aspergillus aculeatus
MVDSFSIYKTALLLSMLATSNAQQVGTYTAETHPSLTWQTCSGSGSCTTTSGSVVIDANWRWVHEVGGYTNCYSGNTWDSSICSTDTTCASECALEGATYESTYGVTTSGSSLRLNFVTTASQKNIGSRLYLLADDSTYETFKLFNREFTFDVDVSNLPCGLNGALYFVSMDADGGVSRFPTNKAGAKYGTGYCDSQCPRDLKFIDGQANIEGWEPSSTDVNAGTGNHGSCCPEMDIWEANSISSAFTAHPCDSVQQTMCTGDTCGGTYSDTTDRYSGTCDPDGCDFNPYRFGNTNFYGPGKTVDNSKPFTVVTQFITHDGTDTGTLTEIRRLYVQNGVVIGNGPSTYTAASGNSITESFCKAEKTLFGDTNVFETHGGLSAMGDALGDGMVLVLSLWDDHAADMLWLDSDYPTTSCASSPGVARGTCPTTTGNATYVEANYPNSYVTYSNIKFGTLNSTYSGTSSGGSSSSSTTLTTKASTSTTSSKTTTTTSKTSTTSSSSTNVAQLYGQCGGQGWTGPTTCASGTCTKQNDYYSQCL

SEQ ID NO: 75 - protein, 457 aa, Dictyostelium discoideum
MYRILKSFILLSLVNMSLSQKIGKLTPEVHPPMTFQKCSEGGSCETIQGEVVVDANWRWVHSAQGQNCYTGNTWNPTICPDDETCAENCYLDGANYESVYGVTTSEDSVRLNFVTQSQGKNIGSRLFLMSNESNYQLFHVLGQEFTFDVDVSNLDCGLNGALYLVSMDSDGGSARFPTNEAGAKYGTGYCDAQCPRDLKFISGSANVDGWIPSTNNPNTGYGNLGSCCAEMDLWEANNMATAVTPHPCDTSSQSVCKSDSCGGAASSNRYGGICDPDGCDYNPYRMGNTSFFGPNKMIDTNSVITVVTQFITDDGSSDGKLTSIKRLYVQDGNVISQSVSTIDGVEGNEVNEEFCTNQKKVFGDEDSFTKHGGLAKMGEALKDGMVLVLSLWDDYQANMLWLDSSYPTTSSPTDPGVARGSCPTTSGVPSKVEQNYPNAYVVYSNIKVGPIDSTYKK

SEQ ID NO: 76 - protein, 504 aa, Sclerotinia sclerotiorum
MISRVLAISSLLAAARAQQIGTNTAEVHPALTSIVIDANWRWLHTTSGYTNCYTGNSWDATLCPDAVTCAANCALDGADYSGTYGITTSGNSLKLNFVTKGANTNVGSRTYLMAAGSKTQYQLLKLLGQEFTFDVDVSNLPCGLNGALYFAEMDADGGVSRFPTNKAGAQYGTGYCDAQCPQDIKFINGQANSVGWTPSSNDVNTGTGQYGSCCSEMDIWEANKISAAYTPHPCSVDGQTRCTGTDCGIGARYSSLCDADGCDFNSYRMGDTGFYGAGLTVDTSKVFTVVTQFITNDGTTSGTLSEIRRFYVQNGKVIPNSQSKVTGVSGNSITDSFCAAQKTAFGDTNEFATKGGLATMSKALAKGMVLVMSIWDDHSANMLWLDAPYPASKSPSAAGVSRGSCSASSGVPADVEANSPGASVTYSNIKWGPINSTYSAGTGSNTGSGSGSTTTLVSSVPSSTPTSTTGVPKYGQCGGSGYTGPTNCIGSTCVSMGQYYSQCQ

SEQ ID NO: 77 - protein, 452 aa, Chaetomium globosum
MYRQVATALSFASLVLGQQVGTLTAETHPSLPIEVCTAPGSCTKEDTTVVLDANWRWTHVTDGYTNCYTGNAWNETACPDGKTCAANCAIDGAEYEKTYGITTPEEGALRLNFVTESNVGSRVYLMAGEDKYRLFNLLNKEFTMDVDVSNLPCGLNGAVYFSEMDEDGGMSRFEGNKAGAKYGTGYCDSQCPRDIKFINGEANSEGWGGEDGNSGTGKYGTCCAEMDIWEANLDATAYTPHPCKVTEQTRCEDDTECGAGDARYEGLCDRDGCDFNSFRLGNKEFYGPEKTVDTSKPFTLVTQFVTADGTDTGALQSIRRFYVQDGTVIPNSETVVEGVDPTNEITDDFCAQQKTAFGDNNHFKTIGGLPAMGKSLEKMVLVLSIWDDHAVYMNWLDSNYPTDADPTKPGVARGRCDPEAGVPETVEAAHPDAYVIYSNIKIGALNSTFAAA

SEQ ID NO: 78 - protein, 536 aa, Aspergillus niger
MSSFQVYRAALLLSILATANAQQVGTYTTETHPSLTWQTCTSDGSCTTNDGEVVIDANWRWVHSTSSATNCYTGNEWDTSICTDDVTCAANCALDGATYEATYGVTTSGSELRLNFVTQGSSKNIGSRLYLMSDDSNYELFKLLGQEFTFDVDVSNLPCGLNGALYFVAMDADGGTSEYSGNKAGAKYGTGYCDSQCPRDLKFINGEANCDGWEPSSNNVNTGVGDHGSCCAEMDVWEANSISNAFTAHPCDSVSQTMCDGDSCGGTYSASGDRYSGTCDPDGCDYNPYRLGNTDFYGPGLTVDTNSPFTVVTQFITDDGTSSGTLTEIKRLYVQNGEVIANGASTYSSVNGSSITSAFCESEKTLFGDENVFDKHGGLEGMGEAMAKGMVLVLSLWDDYAADMLWLDSDYPVNSSASTPGVARGTCSTDSGVPATVEAESPNAYVTYSNIKFGPIGSTYSSGSSSGSGSSSSSSSTTTKATSTTLKTTSTTSSGSSSTSAAQAYGQCGGQGWTGPTTCVSGYTCTYENAYYSQCL

SEQ ID NO: 79 - protein, 508 aa, Nectria haematococca
MYRAIATASALLATARAQQVCTLNTENKPALTWAKCTSSGCSNVRGSVVVDANWRWAHSTSSSTNCYTGNTWDKTLCPDGKTCADKCCLDGADYSGTYGVTSSGNQLNLKFVTVGPYSTNVGSRLYLMEDENNYQMFDLLGNEFTFDVDVNNIGCGLNGALYFVSMDKDGGKSRFSTNKAGAKYGTGYCDAQCPRDVKFINGVANSDEWKPSDSDKNAGVGKYGTCCPEMDIWEANKISTAYTPHPCKSLTQQSCEGDACGGTYSATRYAGTCDPDGCDFNPYRQGNKTFYGPGSGFNVDTTKKVTVVTQFIKGSDGKLSEIKRLYVQNGKVIGNPQSEIANNPGSSVTDSFCKAQKVAFNDPDDFNKKGGWSGMSDALAKPMVLVMSLWHDHYANMLWLDSTYPKGSKTPGSARGSCPEDSGDPDTLEKEVPNSGVSFSNIKFGPIGSTYTGTGGSNPDPEEPEEPEEPVGTVPQYGQCGGINYSGPTACVSPYKCNKINDFYSQCQ

SEQ ID NO: 80 - protein, 437 aa, Talaromyces emersonii
EQAGTATAENHPPLTWQECTAPGSCTTQNGAVVLDANWRWVHDVNGYTNCYTGNTWDPTYCPDDETCAQNCALDGADYEGTYGVTSSGSSLKLNFVTGSNVGSRLYLLQDDSTYQIFKLLNREFSFDVDVSNLPCGLNGALYFVAMDADGGVSKYPNNKAGAKYGTGYCDSQCPRDLKFIDGEANVEGWQPSSNNANTGIGDHGSCCAEMDVWEANSISNAVTPHPCDTPGQTMCSGDDCGGTYSNDRYAGTCDPDGCDFNPYRMGNTSFYGPGKIIDTTKPFTVVTQFLTDDGTDTGTLSEIKRFYIQNSNVIPQPNSDISGVTGNSITTEFCTAQKQAFGDTDDFSQHGGLAKMGAAMQQGMVLVMSLWDDYAAQMLWLDSDYPTDADPTTPGIARGTCPTDSGVPSDVESQSPNSYVTYSNIKFGPINSTFTAS

SEQ ID NO: 81 - protein, 458 aa, Polyporus arcularius
MFPTLALVSLSFLAIAYGQQVGTLTAETHPKLSVSQCTAGGSCTTVQRSVVLDSNWRWLHDVGGSTNCYTGNTWDDSLCPDPTTCAANCALDGADYSGTYGITTSGNALSLKFVTQGPYSTNIGSRVYLLSEDDSTYEMFNLKNQEFTFDVDMSALPCGLNGALYFVEMDKDGGSGRFPTNKAGSKYGTGYCDTQCPHDIKFINGEANVLDWAGSSNDPNAGTGHYGTCCNEMDIWEANSMGAAVTPHVCTVQGQTRCEGTDCGDGDERYDGICDKDGCDFNSWRMGDQTFLGPGKTVDTSSKFTVVTQFITADNTTSGDLSEIRRLYVQNGKVIANSKTQIAGMDAYDSITDDFCNAQKTTFGDTNTFEQMGGLATMGDAFETGMVLVMSIWDDHEAKMLWLDSDYPTDADASAPGVSRGPCPTTSGDPTDVESQSPGATVIFSNIKTGPIGSTFTS

SEQ ID NO: 82 - protein, 447 aa, Leptosphaeria maculans
MLSASKAAAILAFCAHTASAWVVGDQQTETHPKLNWQRCTGKGRSSCTNVNGEVVIDANWRWLAHRSGYTNCYTGSEWNQSACPNNEACTKNCAIEGSDYAGTYGITTSGNQMNIKFITKRPYSTNIGARTYLMKDEQNYEMFQLIGNEFTFDVDLSQRCGMNGALYFVSMPQKGQGAPGAKYGTGYCDAQCARDLKFVRGSANAEGWTKSASDPNSGVGKKGACCAQMDVWEANSAATALTPHSCQPAGYSVCEDTNCGGTYSEDRYAGTCDANGCDFNPFRVGVKDFYGKGKTVDTTKKMTVVTQFVGSGNQLSEIKRFYVQDGKVIANPEPTIPGMEWCNTQKKVFQEEAYPFNEFGGMASMSEGMSQGMVLVMSLWDDHYANMLWLDSNWPREADPAKPGVARRDCPTSGGKPSEVEAANPNAQVMFSNIKFGPIGSTFAHAA

SEQ ID NO: 83 - protein, 516 aa, Phanerochaete chrysosporium
MFRTATLLAFTMAAMVFGQQVGTNTARSHPALTSQKCTKSGGCSNLNTKIVLDANWRWLHSTSGYTNCYTGNQWDATLCPDGKTCAANCALDGADYTGTYGITASGSSLKLQFVTGSNVGSRVYLMADDTHYQMFQLLNQEFTFDVDMSNLPCGLNGALYLSAMDADGGMAKYPTNKAGAKYGTGYCDSQCPRDIKFINGEANVEGWNATSANAGTGNYGTCCTEMDIWEANNDAAAYTPHPCTTNAQTRCSGSDCTRDTGLCDADGCDFNSFRMGDQTFLGKGLTVDTSKPFTVVTQFITNDGTSAGTLTEIRRLYVQNGKVIQNSSVKIPGIDPVNSITDNFCSQQKTAFGDTNYFAQHGGLKQVGEALRTGMVLALSIWDDYAANMLWLDSNYPTNKDPSTPGVARGTCATTSGVPAQIEAQSPNAYVVFSNIKFGDLNTTYTGTVSSSSVSSSHSSTSTSSSHSSSSTPPTQPTGVTVPQWGQCGGIGYTGSTTCASPYTCHVLNPYYSQCY

SEQ ID NO: 84 - protein, 453 aa, Penicillium decumbens
MYQRALLFSALMAGVSAQQVGTQKPETHPPLAWKECTSSGCTSKDGSVVIDANWRWVHSVDGYKNCYTGNEWDSTLCPDDATCATNCAVDGADYAGTYGATTEGDSLSINFVTGSNIGSRFYLMEDENKYQMFKLLNKEFTFDVDVSTLPCGLNGALYFVSMDADGGMSKYETNKAGAKYGTGYCDSQCPRDLKFINGKGNVEGWKPSANDKNAGVGPHGSCCAEMDIWEANSISTALTPHPCDTNGQTICEGDSCGGTYSTTRYAGTCDPDGCDFNPFRMGNESFYGPGKMVDTKSKMTVVTQFITSDGTDTGSLKEIKRVYVQNGKVIANSASDVSGITGNSITSDFCTAQKKTFGDEDVFNKHGGLSGMGDALGEGMVLVMSLWDDHNSNMLWLDGEKYPTDAAASKAGVSRGTCSTDSGKPSTVESESGSAKVVFSNIKVGSIGSTFSA

SEQ ID NO: 85 - protein, 450 aa, Sclerotinia sclerotiorum
MTSKIALASLFAAAYGQQIGTYTTETHPSLTWQSCTAKGSCTTQSGSIVLDGNWRWTHSTTSSTNCYTGNTWDATLCPDDATCAQNCALDGADYSGTYGITTSGDSLRLNFVTQTANKNVGSRVYLLADNTHYKTFNLLNQEFTFDVDVSNLPCGLNGAVYFANLPADGGISSTNKAGAQYGTGYCDSQCPRDGKFINGKANVDGWVPSSNNPNTGVGNYGSCCAEMDIWEANSISTAVTPHSCDTVTQTVCTGDNCGGTYSTTRYAGTCDPDGCDFNPYRQGNESFYGPGKTVDTNSVFTIVTQFLTTDGTSSGTLNEIKRFYVQNGKVIPNSESTISGVTGNSITTPFCTAQKTAFGDPTSFSDHGGLASMSAAFEAGMVLVLSLWDDYYANMLWLDSTYPTTKTGAGGPRGTCSTSSGVPASVEASSPNAYVVYSNIKVGAINSTFG

SEQ ID NO: 86 - protein, 523 aa, Acremonium thermophilum
MYTKFAALAALVATVRGQAACSLTAETHPSLQWQKCTAPGSCTTVSGQVTIDANWRWLHQTNSSTNCYTGNEWDTSICSSDTDCATKCCLDGADYTGTYGVTASGNSLNLKFVTQGPYSKNIGSRMYLMESESKYQGFTLLGQEFTFDVDVSNLGCGLNGALYFVSMDLDGGVSKYTTNKAGAKYGTGYCDSQCPRDLKFINGQANIDGWQPSSNDANAGLGNHGSCCSEMDIWEANKVSAAYTPHPCTTIGQTMCTGDDCGGTYSSDRYAGICDPDGCDFNSYRMGDTSFYGPGKTVDTGSKFTVVTQFLTGSDGNLSEIKRFYVQNGKVIPNSESKIAGVSGNSITTDFCTAQKTAFGDTNVFEERGGLAQMGKALAEPMVLVLSVWDDHAVNMLWLDSTYPTDSTKPGAARGDCPITSGVPADVESQAPNSNVIYSNIRFGPINSTYTGTPSGGNPPGGGTTTTTTTTTSKPSGPTTTTNPSGPQQTHWGQCGGQGWTGPTVCQSPYTCKYSNDWYSQCL

SEQ ID NO: 87 - protein, 446 aa, Aspergillus nidulans
MYQRALLFSALLSVSRAQQAGTAQEEVHPSLTWQRCEASGSCTEVAGSVVLDSNWRWTHSVDGYTNCYTGNEWDATLCPDNESCAQNCAVDGADYEATYGITSNGDSLTLKFVTGSNVGSRVYLMEDDETYQMFDLLNNEFTFDVDVSNFPCGLNGALYFTSMDADGGLSKYEGNTAGAKYGTGYCDSQCPRDIKFINGLGNVEGWEPSDSDANAGVGGMGTCCPEMDIWEANSISTAYTPHPCDSVEQTMCEGDSCGGTYSDDRYGGTCDPDGCDFNSYRMGNTRFYGPGAIIDTSSKFTVVTQFIADGGSLSEIKRFYVQNGEVIPNSESNISGVEGNSITSEFCTAQKTAFGDEDIFAQHGGLSAMGDAASAMVLILSIWDDHHSSMMWLDSSYPTDADPSQPGVARGTCEQGAGDPDVVESEHADASVTFSNIKFGPIGSTF

SEQ ID NO: 88 - protein, 453 aa, Podospora anserine
MMMKQYLQYLAAGSLMTGLVAGQGVGTQQTETHPRITWKRCTGKANCTTVQAEVVIDSNWRWIHTSGGTNCYDGNAWNTAACSTATDCASKCLMEGAGNYQQTYGASTSGDSLTLKFVTKHEYGTNVGSRFYLMNGASKYQMFTLMNNEFTFDVDLSTVECGLNSALYFVAMEEDGGMRSYPTNKAGAKYGTGYCDAQCARDLKFVGGKANIEGWRESSNDENAGVGPYGGCCAEIDVWESNAHAYAFTPHACENNNYHVCERDTCGGTYSEDRFAGGCDANGCDYNPYRMGNPDFYGKGKTVDTTKKFTVVTRFQDDNLEQFFVQNGQKILAPAPTFDGIPASPNLTPEFCSTQFDVFTDRNRFREVGDFPQLNAALRIPMVLVMSIWADHYANMLWLDSVYPPEKEGEPGAARGPCAQDSGVPSEVKANYPNAKVVWSNIRFGPIGSTVNV

SEQ ID NO: 89 - protein, 457 aa, Thermoascus aurantiacus var levisporus
MYQRALLFSFFLAAARAQQAGTVTAENHPSLTWQQCSSGGSCTTQNGKVVIDANWRWVHTTSGYTNCYTGNTWDTSICPDDVTCAQNCALDGADYSGTYGVTTSGNALRLNFVTQSSGKNIGSRLYLLQDDTTYQIFKLLGQEFTFDVDVSNLPCGLNGALYFVAMDADGGLSKYPGNKAGAKYGTGYCDSQCPRDLKFINGQANVEGWQPSANDPNAGVGNHGSCCAEMDVWEANSISTAVTPHPCDTPGQTMCQGDDCGGTYSSTRYAGTCDPDGCDFNPYRQGNHSFYGPGKIVDTSSKFTVVTQFITDDGTPSGTLTEIKRFYVQNGKVIPQSESTISGVTGNSITTEYCTAQKAAFGDNTGFFTHGGLQKISQALAQGMVLVMSLWDDHAANMLWLDSTYPTDADPDTPGVARGTCPTTSGVPADVESQNPNSYVIYSNIKVGPINSTFTAN

SEQ ID NO: 90 - protein, 450 aa, Pseudotrichonympha grassii
MFAIVLLGLTRSLGTGTNQAENHPSLSWQNCRSGGSCTQTSGSVVLDSNWRWTHDSSLTNCYDGNEWSSSLCPDPKTCSDNCLIDGADYSGTYGITSSGNSLKLVFVTNGPYSTNIGSRVYLLKDESHYQIFDLKNKEFTFTVDDSNLDCGLNGALYFVSMDEDGGTSRFSSNKAGAKYGTGYCDAQCPHDIKFINGEANVENWKPQTNDENAGNGRYGACCTEMDIWEANKYATAYTPHICTVNGEYRCDGSECGDTDSGNRYGGVCDKDGCDFNSYRMGNTSFWGPGLIIDTGKPVTVVTQFVTKDGTDNGQLSEIRRKYVQGGKVIENTVVNIAGMSSGNSITDDFCNEQKSAFGDTNDFEKKGGLSGLGKAFDYGMVLVLSLWDDHQVNMLWLDSIYPTDQPASQPGVKRGPCATSSGAPSDVESQHPDSSVTFSDIRFGPIDSTY

SEQ ID NO: 91 - protein, 453 aa, Aspergillus terreus
MHQRALLFSALVGAVRAQQAGTLTEEVHPPLTWQKCTADGSCTEQSGSVVIDSNWRWLHSTNGSTNCYTGNTWDESLCPDNEACAANCALDGADYESTYGITTSGDALTLTFVTGENVGSRVYLMAEDDESYQTFDLVGNEFTFDVDVSNLPCGLNGALYFTSMDADGGVSKYPANKAGAKYGTGYCDSQCPRDLKFINGMANVEGWTPSDNDKNAGVGGHGSCCPELDIWEANSISSAFTPHPCDDLGQTMCSGDDCGGTYSETRYAGTCDPDGCDFNAYRMGNTSYYGPDKIVDTNSVMTVVTQFIGDGGSLSEIKRLYVQNGKVIANAQSNVDGVTGNSITSDFCTAQKTAFGDQDIFSKHGGLSGMGDAMSAMVLILSIWDDHNSSMMWLDSTYPEDADASEPGVARGTCEHGVGDPETVESQHPGATVTFSKIKFGPIGSTYSSNSTA

SEQ ID NO: 92 - protein, 540 aa, Phanerochaete chrysosporium
MFRAAALLAFTCLAMVSGQQAGTNTAENHPQLQSQQCTTSGGCKPLSTKVVLDSNWRWVHSTSGYTNCYTGNEWDTSLCPDGKTCAANCALDGADYSGTYGITSTGTALTLKFVTGSNVGSRVYLMADDTHYQLLKLLNQEFTFDVDMSNLPCGLNGALYLSAMDADGGMSKYPGNKAGAKYGTGYCDSQCPKDIKFINGEANVGNWTETGSNTGTGSYGTCCSEMDIWEANNDAAAFTPHPCTTTGQTRCSGDDCARNTGLCDGDGCDFNSFRMGDKTFLGKGMTVDTSKPFTVVTQFLTNDNTSTGTLSEIRRIYIQNGKVIQNSVANIPGVDPVNSITDNFCAQQKTAFGDTNWFAQKGGLKQMGEALGNGMVLALSIWDDHAANMLWLDSDYPTDKDPSAPGVARGTCATTSGVPSDVESQVPNSQVVFSNIKFGDIGSTFSGTSSPNPPGGSTTSSPVTTSPTPPPTGPTVPQWGQCGGIGYSGSTTCASPYTCHVLNPCESILSLQRSSNADQYLQTTRSATKRRLDTALQPRK

SEQ ID NO: 93 - protein, 504 aa, Phanerochaete chrysosporium
MRTALALILALAAFSAVSAQQAGTITAETHPTLTIQQCTQSGGCAPLTTKVVLDVNWRWIHSTTGYTNCYSGNTWDAILCPDPVTCAANCALDGADYTGTFGILPSGTSVTLRPVDGLGLRLFLLADDSHYQMFQLLNKEFTFDVEMPNMRCGSSGAIHLTAMDADGGLAKYPGNQAGAKYGTGFCSAQCPKGVKFINGQANVEGWLGTTATTGTGFFGSCCTDIALWEANDNSASFAPHPCTTNSQTRCSGSDCTADSGLCDADGCNFNSFRMGNTTFFGAGMSVDTTKLFTVVTQFITSDNTSMGALVEIHRLYIQNGQVIQNSVVNIPGINPATSITDDLCAQENAAFGGTSSFAQHGGLAQVGEALRSGMVLALSIVNSAADTLWLDSNYPADADPSAPGVARGTCPQDSASIPEAPTPSVVFSNIKLGDIGTTFGAGSALFSGRSPPGPVPGSAPASSATATAPPFGSQCGGLGYAGPTGVCPSPYTCQALNIYYSQCI

SEQ ID NO: 94 - protein, 456 aa, Thermoascus aurantiacus
MYQRALLFSFFLAAARAHEAGTVTAENHPSLTWQQCSSGGSCTTQNGKVVIDANWRWVHTTSGYTNCYTGNTWDTSICPDDVTCAQNCALDGADYSGTYGVTTSGNALRLNFVTQSSGKNIGSRLYLLQDDTTYQIFKLLGQEFTFDVDVSNLPCGLNGALYFVAMDADGNLSKYPGNKAGAKYGTGYCDSQCPRDLKFINGQANVEGWQPSANDPNAGVGNHGSSCAEMDVWEANSISTAVTPHPCDTPGQTMCQGDDCGGTYSSTRYAGTCDTDGCDFNPYQPGNHSFYGPGKIVDTSSKFTVVTQFITDDGTPSGTLTEIKRFYVQNGKVIPQSESTISGVTGNSITTEYCTAQKAAFDNTGFFTHGGLQKISQALAQGMVLVMSLWDDHAANMLWLDSTYPTDADPDTPGVARGTCPTTSGVPADVESQNPNSYVIYSNIKVGPINSTFTAN

SEQ ID NO: 95 - protein, 459 aa, Acremonium thermophilum
MHKRAATLSALVVAAAGFARGQGVGTQQTETHPKLTFQKCSAAGSCTTQNGEVVIDANWRWVHDKNGYTNCYTGNEWNTTICADAASCASNCVVDGADYQGTYGASTSGNALTLKFVTKGSYATNIGSRMYLMASPTKYAMFTLLGHEFAFDVDLSKLPCGLNGAVYFVSMDEDGGTSKYPSNKAGAKYGTGYCDSQCPRDLKFIDGKANSASWQPSSNDQNAGVGGMGSCCAEMDIWEANSVSAAYTPHPCQNYQQHSCSGDDCGGTYSATRFAGDCDPDGCDWNAYRMGVHDFYGNGKTVDTGKKFSIVTQFKGSGSTLTEIKQFYVQDGRKIENPNATWPGLEPFNSITPDFCKAQKQVFGDPDRFNDMGGFTNMAKALANPMVLVLSLWDDHYSNMLWLDSTYPTDADPSAPGKGRGTCDTSSGVPSDVESKNGDATVIYSNIKFGPLDSTYTAS

SEQ ID NO: 96 - protein, 536 aa, Volvariella volvacea
MRASLLAFSLNSAAGQQAGTLQTKNHPSLTSQKCRQGGCPQVNTTIVLDANWRWTHSTSGSTNCYTGNTWQATLCPDGKTCAANCALDGADYTGTYGVTTSGNSLTLQFVTQSNVGARLGYLMADDTTYQMFNLLNQEFWFDVDMSNLPCGLNGALYFSAMARTAAWMPMVVCASTPLISTRRSTARLLRLPVPPRSRYGRGICDSQCPRDIKFINGEANVQGWQPSPNDTNAGTGNYGACCNKMDVWEANSISTAYTPHPCTQRGLVRCSGTACGGGSNRYGSICDHDGLGFQNLFGMGRTRVRARVGRVKQFNRSSRVVEPISWTKQTTLHLGNLPWKSADCNVQNGRVIQNSKVNIPGMPSTMDSVTTEFCNAQKTAFNDTFSFQQKGGMANMSEALRRGMVLVLSIWDDHAANMLWLDSITSAAACRSTPSEVHATPLRESQIRSSHSRQTRYVTFTNIKFGPFNSTGTTYTTGSVPTTSTSTGTTGSSTPPQPTGVTVPQGQCGGIGYTGPTTCASPTTCHVLNPYYSQCY

SEQ ID NO: 97 - protein, 450 aa, Chaetomium globosum
MKQYLQYLAAALPLMSLVSAQGVGTSTSETHPKITWKKCSSGGSCSTVNAEVVIDANWRWLHNADSKNCYDGNEWTDACTSSDDCTSKCVLEGAEYGKTYGASTSGDSLSLKFLTKHEYGTNIGSRFYLMNGASKYQMFTLMNNEFAFDVDLSTVECGLNSALYFVAMEEDGGMASYSTNKAGAKYGTGYCDAQCARDLKFVGGKANYDGWTPSSNDANAGVGALGGCCAEIDVWESNAHAFAFTPHACENNNYHVCEDTTCGGTYSEDRFAGDCDANGCDYNPYRVGNTDFYGKGMTVDTSKKFTVVSQFQENKLTQFFVQNGKKIEIPGPKHEGLPTESSDITPELCSAMPEVFGDRDRFAEVGGFDALNKALAVPMVLVMSIWDDHYANMLWLDSSYPPEKAGTPGGDRGPCAQDSGVPSEVESQYPDATVVWSNIRFGPIGSTVQV

SEQ ID NO: 98 - protein, 517 aa, Irpex lacteus
MFPKASLIALSFIAAVYGQQVGTQMAEVHPKLPSQLCTKSGCTNQNTAVVLDANWRWLHTTSGYTNCYTGNSWDATLCPDATTCAQNCAVDGADYSGTYGITTSGNALTLKFKTGTNVGSRVYLMQTDTAYQMFQLLNQEFTFDVDMSNLPCGLNGALYLSQMDQDGGLSKFPTNKAGAKYGTGYCDSQCPHDIKFINGMANVAGWAGSASDPNAGSGTLGTCCSEMDIWEANNDAAAFTPHPCSVDGQTQCSGTQCGDDDERYSGLCDKDGCDFNSFRMGDKSFLGKGMTVDTSRKFTVVTQFVTTDGTTNGDLHEIRRLYVQDGKVIQNSVVSIPGIDAVDSITDNFCAQQKSVFGDTNYFATLGGLKKMGAALKSGMVLAMSVWDDHAASMQWLDSNYPADGDATKPGVARGTCSADSGLPTNVESQSASASVTFSNIKWGDINTTFTGTGSTSPSSPAGPVSSSTSVASQPTQPAQGTVAQWGQCGGTGFTGPTVCASPFTCHVVNPYYSQCY

SEQ ID NO: 99 - protein, 516 aa, Lentinula edodes
MFRTAALLSFAYLAVVYGQQAGTSTAETHPPLTWEQCTSGGSCTTQSSSVVLDSNWRWTHVVGGYTNCYTGNEWNTTVCPDGTTCAANCALDGADYEGTYGISTSGNALTLKFVTASAQTNVGSRVYLMAPGSETEYQMFNPLNQEFTFDVDVSALPCGLNGALYFSEMDADGGLSEYPTNKAGAKYGTGYCDSQCPRDIKFIEGKANVEGWTPSSTSPNAGTGGTGICCNEMDIWEANSISEALTPHPCTAQGGTACTGDSCSSPNSTAGICDQAGCDFNSFRMGDTSFYGPGLTVDTTSKITVVTQFITSDNTTTGDLTAIRRIYVQNGQVIQNSMSNIAGVTPTNEITTDFCDQQKTAFGDTNTFSEKGGLTGMGAAFSRGMVLVLSIWDDDAAEMLWLDSTYPVGKTGPGAARGTCATTSGQPDQVETQSPNAQVVFSNIKFGAIGSTFSSTGTGTGTGTGTGTGTGTTTSSAPAATQTKYGQCGGQGWTGATVCASGSTCTSSGPYYSQCL

SEQ ID NO: 100 - protein, 523 aa, Pleurotus sp Florida
MFRTAALTAFTFAAVVLGQQVGTLTTENHPALSIQQCTATGCTTQQKSVVLDSNWRWTHSTAGATNCYTGNAWDPALCPDPATCATNCAIDGADYSGTYGITTSGNALTLRFVTNGQYSQNIGSRVYLLDDADHYKLFDLKNQEFTFDVDMSGLPCGLNGALYFSEMAADGGKAAHAGNNAGAKYGTGYCDAQCPHDIKWINGEANVLDWSASATDDNAGNGRYGACCAEMDIWEANSEATAYTPHVCRDEGLYRCSGTECGDGNNRYGGVCDKDGCDFNSYRMGDKNFLGRGKTIDTTKKVTVVTQFITDNNTPTGNLVEIRRVYVQNGVVYQNSFSTFPSLSQYNSISDEFCVAQKTLFGDNQYYNTHGGTTKMGDAFDNGMVLIMSLWSDHAAHMLWLDSDYPLDKSPSEPGVSRGACPTSSGDPDDVVANHPNASVTFSNIKYGPIGSTFGGSTPPVSSGGSSVPPVTSTTSSGTTTPTGPTGTVPKWGQCGGIGYSGPTACVAGSTCTYSNDWYSQCL

SEQ ID NO: 101 - protein, 507 aa, Fusarium venenatum
MYRAIATASALIAAVRAQQVCSLTPETKPALSWSKCTSSGCSNVQGSVTIDANWRWTHQLSGSTNCYTGNKWDTSICTSGKVCAEKCCIDGAEYASTYGITSSGNQLSLSFVTKGTYGTNIGSRTYLMEDENTYQMFQLLGNEFTFDVDVSNIGCGLNGALYFVSMDADGGKAKYPGNKAGAKYGTGYCDAQCPRDVKFINGQANSDGWQPSKSDVNGGIGNLGTCCPEMDIWEANSISTAHTPHPCTKLTQHSCTGDSCGGTYSEDRYGGTCDADGCDFNAYRQGNKTFYGPGSGFNVDTTKKVTVVTQFHKGSNGRLSEITRLYVQNGKVIANSESKIAGVPGSSLTPEFCTAQKKVFGDIDDFEKKGAWGGMSDALEAPMVLVMSLWHDHHSNMLWLDSTYPTDSTKLGAQRGSCSTSSGVPADLEKNVPNSKVAFSNIKFGPIGSTYKEGQPEPTNPTNPNPTTPGGTVDQWGQCGGTNYSGPTACKSPFTCKKINDFYSQCQ

SEQ ID NO: 102 - protein, 516 aa, Phanerochaete chrysosporium
MFRTATLLAFTMAAMVFGQQVGTNTAENHRTLTSQKCTKSGGCSNLNTKIVLDANWRWLHSTSGYTNCYTGNQWDATLCPDGKTCAANCALDGADYTGTYGITASGSSLKLQFVTGSNVGSRVYLMADDTHYQMFQLLNQEFTFDVDMSNLPCGLNGALYLSAMDADGGMAKYPTNKAGAKYGTGYCDSQCPRDIKFINGEANVEGWNATSANAGTGNYGTCCTEMDIWEANNDAAAYTPHPCTTNAQTRCSGSDCTRDTGLCDADGCDFNSFRMGDQTFLGKGLTVDTSKPFTVVTQFITNDGTSAGTLTEIRRLYVQNGKVIQNSSVKIPGIDLVNSITDNFCSQQKTAFGDTNYFAQHGGLKQVGEALRTGMVLALSIWDDYAANMLWLDSNYPTNKDPSTPGVARGTCATTSGVPAQIEAQSPNAYVVFSNIKFGDLNTTYTGTVSSSSVSSSHSSTSTSSSHSSSSTPPTQPTGVTVPQWGQCGGIGYTGSTTCASPYTCHVLNPYYSQCY

SEQ ID NO: 103 - protein, 464 aa, Fusicoccum sp
MYQTSLLASLSFLLATSQAQQVGTQTAETHPKLTTQKCTTAGGCTDQSTSIVLDANWRWLHTVDGYTNCYTGQEWDTSICTDGKTCAEKCALDGADYESTYGISTSGNALTMNFVTKSSQTNIGGRVYLLAADSDDTYELFKLKNQEFTFDVDVSNLPCGLNGALYFSEMDSDGGLSKYTTNKAGAKYGTGYCDTQCPHDIKFINGEANVQNWTASSTDKNAGTGHYGSCCNEMDIWEANSQATAFTPHVCEAKVEGQYRCEGTECGDGDNRYGGVCDKDGCDFNSYRMGNETFYGSNGSTIDTTKKFTVVTQFITADNTATGALTEIRRKYVQNDVVIENSYADYETLSKFNSITDDFCAAQKTLSGDTNDFKTKGGIARMGESFERGMVLVMSVWDDHAANALWLDSSYPTDADASKPGVKRGPCSTSSGVPSDVEANDADSSVIYSNIRYGDIGSTFNKTA

SEQ ID NO: 104 - protein, 460 aa, Coprinopsis cinerea okayama
MFSKVALTALCFLAVAQAQQVGREVAENHPRLPWQRCTRNGGCQTVSNGQVVLDANWRWLHVTDGYTNCYTGNAWNSSVCSDGATCAQRCALEGANYQQTYGITTSGDALTIKFLTRSEQTNIGARVYLMENEDRYQMFNLLNKEFTFDVDVSKVPCGINGALYFIQMDADGGLSSQPNNRAGAKYGTGYCDSQCPRDIKFINGEANSVGWEPSETDPNAGKGQYGICCAEMDIWEANSISNAYTPHPCQTVNDGGYQRCQGRDCNQPRYEGLCDPDGCDYNPFRMGNKDFYGPGKTVDTNRKMTVVTQFITHDNTDTGTLVDIRRLYVQDGRVIANPPTNFPGLMPAHDSITQEFCDDAKRAFEDNDSFGRNGGLAHMGRSLAKGHVLALSIWNDHTAHMLWLDSNYPTDADPNKPGIARGTCPTTGGSPRDTEQNHPDAQVIFSNIKFGDIGSTFSGN

SEQ ID NO: 105 - protein, 505 aa, Trichoderma harzianum
MYRKLAVISAFLAAARAQQVCTQQAETHPPLTWQKCTASGCTPQQGSVVLDANWRWTHDTKSTTNCYDGNTWSSTLCPDDATCAKNCCLDGANYSGTYGVTTSGDALTLQFVTASNVGSRLYLMANDSTYQEFTLSGNEFSFDVDVSQLPCGLNGALYFVSMDADGGQSKYPGNAAGAKYGTGYCDSQCPRDLKFINGQANVEGWEPSSNNANTGVGGHGSCCSEMDIWEANSISEALTPHPCETVGQTMCSGDSCGGTYSNDRYGGTCDPDGCDWNPYRLGNTSFYGPGSSFALDTTKKLTVVTQFATDGSISRYYVQNGVKFQQPNAQVGSYSGNTINTDYCAAEQTAFGGTSFTDKGGLAQINKAFQGGMVLVMSLWDDYAVNMLWLDSTYPTNATASTPGAKRGSCSTSSGVPAQVEAQSPNSKVIYSNIRFGPIGSTGGNTGSNPPGTSTTRAPPSSTGSSPTATQTHYGQCGGTGWTGPTRCASGYTCQVLNPFYSQCL

SEQ ID NO: 106 - protein, 516 aa, Neurospora crassa
MRASLLAFSLAAAVAGGQQAGTLTAKRHPSLTWQKCTRGGCPTLNTTMVLDANWRWTHATSGSTKCYTGNKWQATLCPDGKSCAANCALDGADYTGTYGITGSGWSLTLQFVTDNVGARAYLMADDTQYQMLELLNQELWFDVDMSNIPCGLNGALYLSAMDADGGMRKYPTNKAGAKYATGYCDAQCPRDLKYINGIANVEGWTPSTNDANGIGDHGSCCSEMDIWEANKVSTAFTPHPCTTIEQHMCEGDSCGGTYSDDRYGVLCDADGCDFNSYRMGNTTFYGEGKTVDTSSKFTVVTQFIKDSAGDLAEIKAFYVQNGKVIENSQSNVDGVSGNSITQSFCKSQKTAFGDIDDFNKKGGLKQMGKALAQAMVLVMSIWDDHAANMLWLDSTYPVPKVPGAYRGSGPTTSGVPAEVDANAPNSKVAFSNIKFGHLGISPFSGGSSGTPPSNPSSSASPTSSTAKPSSTSTASNPSGTGAAHWAQCGGIGFSGPTTCPEPYTCAKDHDIYSQCV

SEQ ID NO: 107 - protein, 530 aa, Neosartorya fischeri
MLASTFSYRMYKTALILAALLGSGQAQQVGTSQAEVHPSMTWQSCTAGGSCTTNNGKVVIDANWRWVHKVGDYTNCYTGNTWDKTLCPDDATCASNCALEGANYQSTYGATTSGDSLRLNFVTTSQQKNIGSRLYMMKDDTTYEMFKLLNQEFTFDVDVSNLPCGLNGALYFVAMDADGGMSKYPTNKAGAKYGTGYCDSQCPRDLKFINGQANVEGWQPSSNDANAGTGNHGSCCAEMDIWEANSISTAFTPHPCDTPGQVMCTGDACGGTYSSDRYGGTCDPDGCDFNSFRQGNKTFYGPGMTVDTKSKFTVVTQFITDDGTASGTLKEIKRFYVQNGKVIPNSESTWSGVGGNSITNDYCTAQKSLFKDQNVFAKHGGMEGMGAALAQGMVLVMSLWDDHAANMLWLDSNYPTTASSSTPGVARGTCDISSGVPADVEANHPDASVVYSNIKVGPIGSTFNSGGSNPGGGTTTTAKPTTTTTTAGSPGGTGVAQHYGQCGGNGWQGPTTCASPYTCQKLNDFYSQCL

SEQ ID NO: 108 - protein, 451 aa, Chaetomium thermophilum
MQIKQYLQYLAAALPLVNMAAAQRAGTQQTETHPRLSWKRCSSGGNCQTVNAEIVIDANWRWLHDSNYQNCYDGNRWTSACSSATDCAQKCYLEGANYGSTYGVSTSGDALTLKFVTKHEYGTNIGSRVYLMNGSDKYQMFTLMNNEFAFDVDLSKVECGLNSALYFVAMEEDGGMRSYSSNKAGAKYGTGYCDAQCARDLKFVGGKANIEGWRPSTNDANAGVGPYGACCAEIDVWESNAYAFAFTPHGCLNNNYHVCETSNCGGTYSEDRFGGLCDANGCDYNPYRMGNKDFYGKGKTVDTSRKFTVVTRFEENKLTQFFIQDGRKIDIPPPTWPGLPNSSAITPELCTNLSKVFDDRDRYEETGGFRTINEALRIPMVLVMSIWDGHYASMLWLDSVYPPEKAGQPGAERGPCAPTSGVPAEVEAQFPNAQVIWSNIRFGPIGSTYQV

SEQ ID NO: 109 - protein, 450 aa, Botryotinia fuckeliana
MTSRIALVSLFAAVYGQQVGTYQTETHPSLTWQSCTAKGSCTTNTGSIVLDGNWRWTHGVGTSTNCYTGNTWDATLCPDDATCAQNCALEGADYSGTYGITTSGNSLRLNFVTQSANKNIGSRVYLMADTTHYKTFNLLNQEFTFDVDVSNLPCGLNGAVYFANLPADGGISSTNTAGAEYGTGYCDSQCPRDMKFIKGQANVDGWVPSSNNANTGVGNHGSCCAEMDIWEANSISTAVTPHSCDTVTQTVCTGDDCGGTYSSSRYAGTCDPDGCDFNSYRMGDETFYGPGKTVDTNSVFTVVTQFLTTDGTASGTLNEIKRFYVQDGKVIPNSYSTISGVSGNSITTPFCDAQKTAFGDPTSFSDHGGLASMSAAFEAGMVLVLSLWDDYYANMLWLDSTYPVGKTSAGGPRGTCDTSSGVPASVEASSPNAYVVYSNIKVGAINSTYG

SEQ ID NO: 110 - protein, 450 aa, Pseudotrichonympha grassii
MFVFVLLWLTQSLGTGTNQAENHPSLSWQNCRSGGSCTQTSGSVVLDSNWRWTHDSSLTNCYDGNEWSSSLCPDPKTCSDNCLIDGADYSGTYGITSSGNSLKLVFVTNGPYSTNIGSRVYLLKDESHYQIFDLKNKEFTFTVDDSNLDCGLNGALYFVSMDEDGGTSRFSSNKAGAKYGTGYCDAQCPHDIKFINGEANVENWKPQTNDENAGNGRYGACCTEMDIWEANKYATAYTPHICTVNGEYRCDGSECGDTDSGNRYGGVCDKDGCDFNSYRMGNTSFWGPGLIIDTGKPVTVVTQFVTKDGTDNGQLSEIRRKYVQGGKVIENTVVNIAGMSSGNSITDDFCNEQKSAFGDTNDFEKKGGLSGLGKAFDYGMVLVLSLWDDHQVNMLWLDSIYPTDQPASQPGVKRGPCATSSGAPSDVESQHPDSSVTFSDIRFGPIDSTY

SEQ ID NO: 111 - protein, 523 aa, Irpex lacteus
MFRKAALLAFSFLAIAHGQQVGTNQAENHPSLPSQKCTASGCTTSSTSVVLDANWRWVHTTTGYTNCYTGQTWDASICPDGVTCAKACALDGADYSGTYGITTSGNALTLQFVKGTNVGSRVYLLQDASNYQMFQLINQEFTFDVDMSNLPCGLNGAVYLSQMDQDGGVSRFPTNTAGAKYGTGYCDSQCPRDIKFINGEANVEGWTGSSTDSNSGTGNYGTCCSEMDIWEANSVAAAYTPHPCSVNQQTRCTGADCGQGDDRYDGVCDPDGCDFNSFRMGDQTFLGKGLTVDTSRKFTIVTQFISDDGTTSGNLAEIRRFYVQDGNVIPNSKVSIAGIDAVNSITDDFCTQQKTAFGDTNRFAAQGGLKQMGAALKSGMVLALSLWDDHAANMLWLDSDYPTTADASNPGVARGTCPTTSGFPRDVESQSGSATVTYSNIKWGDLNSTFTGTLTTPSGSSSPSSPASTSGSSTSASSSASVPTQSGTVAQWAQCGGIGYSGATTCVSPYTCHVVNAYYSQCY

SEQ ID NO: 112 - protein, 513 aa, Gibberella avenacea
MYRAIATASALIAAARAQQVCTLTTETKPALTWSKCTSSGCTDVKGSVGIDANWRWTHQTSSSTNCYTGNKWDTSVCTSGETCAQKCCLDGADYAGTYGITSSGNQLSLGFVTKGSFSTNIGSRTYLMENENTYQMFQLLGNEFTFDVDVSNIGCGLNGALYFVSMDADGGKARYPANKAGAKYGTGYCDAQCPRDVKFINGKANSDGWKPSDSDINAGIGNMGTCCPEMDIWEANSISTAFTPHPCTKLTQHACTGDSCGGTYSNDRYGGTCDADGCDFNSYRQGNKTFYGRGSDFNVDTTKKVTVVTQFKKGSNGRLSEITRLYVQNGKVIANSESKIPGNSGSSLTADFCSKQKSVFGDIDDFSKKGGWSGMSDALESPPMVLVMSLWHDHHSNMLWLDSTYPTDSTKLGAQRGSCATTSGVPSDLERDVPNSKVSFSNIKFGPIGSTYSSGTTNPPPSSTDTSTTPTNPPTGGTVGQYGQCGGQTYTGPKDCKSPYTCKKINDFYSQCQ

SEQ ID NO: 113 - protein, 536 aa, Aspergillus niger
MSSFQIYRAALLLSILATANAQQVGTYTTETHPSLTWQTCTSDGSCTTNDGEVVIDANWRWVHSTSSATNCYTGNEWDTSICTDDVTCAANCALDGATYEATYGVTTSGSELRLNFVTQGSSKNIGSRLYLMSDDSNYELFKLLGQEFTFDVDVSNLPCGLNGALYFVAMDADGGTSEYSGNKAGAKYGTGYCDSQCPRDLKFINGEANCDGWEPSSNNVNTGVGDHGSCCAEMDVWEANSISNAFTAHPCDSVSQTMCDGDSCGGTYSASGDRYSGTCDPDGCDYNPYRLGNTDFYGPGLTVDTNSPFTVVTQFITDDGTSSGTLTEIKRLYVQNGEVIANGASTYSSVNGSSITSAFCESEKTLFGDENVFDKHGGLEGMGEAMAKGMVLVLSLWDDYAADMLWLDSDYPVNSSASTPGVARGTCSTDSGVPATVEAESPNAYVTYSNIKFGPIGSTYSSGSSSGSGSSSSSSSTTTKATSTTLKTTSTTSSGSSSTSAAQAYGQCGGQGWTGPTTCVSGYTCTYENAYYSQCL

SEQ ID NO: 114 - protein, 452 aa, Aspergillus niger
MHQRALLFSALLTAVRAQQAGTLTEEVHPSLTWQKCTSEGSCTEQSGSVVIDSNWRWTHSVNDSTNCYTGNTWDATLCPDDETCAANCALDGADYESTYGVTTDGDSLTLKFVTGSNVGSRLYLMDTSDEGYQTFNLLDAEFTFDVDVSNLPCGLNGALYFTAMDADGGVSKYPANKAGAKYGTGYCDSQCPRDLKFIDGQANVDGWEPSSNNDNTGIGNHGSCCPEMDIWEANKISTALTPHPCDSSEQTMCEGNDCGGTYSDDRYGGTCDPDGCDFNPYRMGNDSFYGPGKTIDTGSKMTVVTQFITDGSGSLSEIKRYYVQNGNVIANADSNISGVTGNSITTDFCTAQKKAFGDEDIFAEHNGLAGISDAMSSMVLILSLWDDYYASMEWLDSDYPENATATDPGVARGTCDSESGVPATVEGAHPDSSVTFSNIKFGPINSTFSASA

SEQ ID NO: 115 - protein, 526 aa, Chrysosporium lucknowense
  misc_feature (249)..(249): Xaa can be any naturally occurring amino acid
  misc_feature (365)..(365): Xaa can be any naturally occurring amino acid
MYAKFATLAALVAGAAAQNACTLTAENHPSLTWSKCTSGGSCTSVQGSITIDANWRWTHRTDSATNCYEGNKWDTSYCSDGPSCASKCCIDGADYSSTYGITTSGNSLNLKFVTKGQYSTNIGSRTYLMESDTKYQMFQLLGNEFTFDVDVSNLGCGLNGALYFVSMDADGGMSKYSGNKAGAKYGTGYCDSQCPRDLKFINGEANVENWQSSTNDANAGTGKYGSCCSEMDVWEANNMAAAFTPHPCXVIGQSRCEGDSCGGTYSTDRYAGICDPDGCDFNSYRQGNKTFYGKGMTVDTTKKITVVTQFLKNSAGELSEIKRFYVQNGKVIPNSESTIPGVEGNSITQDWCDRQKAAFGDVTDXQDKGGMVQMGKALAGPMVLVMSIWDDHAVNMLWLDSTWPIDGAGKPGAERGACPTTSGVPAEVEAEAPNSNVIFSNIRFGPIGSTVSGLPDGGSGNPNPPVSSSTPVPSSSTTSSGSSGPTGGTGVAKHYEQCGGIGFTGPTQCESPYTCTKLNDWYSQCL

SEQ ID NO: 116 - protein, 538 aa, Thielavia australiensis
MYAKFATLAALVAGASAQAVCSLTAETHPSLTWQKCTAPGSCTNVAGSITIDANWRWTHQTSSATNCYSGSKWDSSICTTGTDCASKCCIDGAEYSSTYGITTSGNALNLKFVTKGQYSTNIGSRTYLMESDTKYQMFKLLGNEFTFDVDVSNLGCGLNGALYFVSMDADGGMSKYSGNKAGAKYGTGYCDAQCPRDLKFINGEANVEGWESSTNDANAGSGKYGSCCTEMDVWEANNMATAFTPHPCTTIGQTRCEGDTCGGTYSSDRYAGVCDPDGCDFNSYRQGNKTFYGKGMTVDTTKKITVVTQFLKNSAGELSEIKRFYAQDGKVIPNSESTIAGIPGNSITKAYCDAQKTVFQNTDDFTAKGGLVQMGKALAGDMVLVMSVWDDHAVNMLWLDSTYPTDQVGVAGAERGACPTTSGVPSDVEANAPNSNVIFSNIRFGPIGSTVQGLPSSGGTSSSSSAAPQSTSTKASTTTSAVRTTSTATTKTTSSAPAQGTNTAKHWQQCGGNGWTGPTVCESPYKCTKQNDWYSQCL

SEQ ID NO: 117 - protein, 441 aa, Reticulitermes speratus
MLTLVYFLLSLVVSLEIGTQQSEDHPKLTWQNGSSSVSGSIVLDSNWRWVHDSGTTNCYDGNLWSKDLCPSSDTCSQKCYIEGADYSGTYGIQSSGSKLTLKFVTKGSYSTNIGSRVYLLKDENTYESFKLKNKEFTFTVDDSKLNCGLNGALYFVAMDADGGKAKYSSFKPGAKYGMGYCDAQCPHDMKFISGKANVDDWKPQDNDENSGNGKLGTCCSEMDIWEGNMKSQAYTVHACTKSGQYECTGQQCGDTDSGDRFKGTCDKDGCDYASWRWGDQSFYGEGKTVDTKQPVTVVTQFIGDPLTEIRRLYVQGGKTINNSKTSNLADTYDSITDKFCDATKEASGDTNDFKAKGAMSGFSTNLNNGQVLVMSLWDDHTANMLWLDSTYPTDSSDSTAQRGPCPTSSGVPKDVESQHGDATVVFSDIKFGAINSTFKYN

SEQ ID NO: 118 - protein, 445 aa, Neotermes koshunensis
MLAAALFTFACSVGVGTKTPENHPKLNWQNCASKGSCSQVSGEVTMDSNWRWTHDGNGKNCYDGNTWISSLCPDDKTCSDKCVLDGAEYQATYGIQSNGTALTLKFVTHGSYSTNIGSRLYLLKDKSTYYVFKLNNKEFTFSVDVSKLPCGLNGALYFVEMDADGGKAKYAGAKPGAEYGLGYCDAQCPSDLKFINGEANSEGWKPQSGDKNAGNGKYGSCCSEMDVWESNSQATALTPHVCKTTGQQRCSGKSECGGQDGQDRFAGLCDEDGCDFNNWRMGDKTFFGPGLIVDTKSPFVVVTQFYGSPVTEIRRKYVQNGKVIENSKSNIPGIDATAAISDHFCEQQKKAFGDTNDFKNKGGFAKLGQVFDRGMVLVLSLWDDHQVAMLWLDSTYPTNKDKSQPGVDRGPCPTSSGKPDDVESASADATVVYGNIKFGALDSTY

SEQ ID NO: 119 - protein, 441 aa, Reticulitermes speratus
MLTLVYFLLSLVVSLEIGTQQSEDHPKLTWQNGSSSVSGSIVLDSNWRWVHDSGTTNCYDGNLWSKDLCPSSNTCSQKCYIEGADYSGTYGIQSSGSKLTLKFVTKGSYSTNIGSRVYLLKDENTYESFKLKNKEFTFTVDDSKLNCGLNGALYFVAMDADGGKAKYSSFKPGAKYGMGYCDAQCPHDMKFISGKANVDDWKPQDNDENSGNGKLGTCCSEMDIWEGNMKSQAYTVHACTKSGQYECTGQQCGDTDSGDRFKGTCDKDGCDYASWRWGDQSFYGEGKTVDTKQPVTVVTQFIGDPLTEIRRLYVQGGKTINNSKTSNLADTYDSITDKFCDATKEASGDTNDFKAKGAMSGFSTNLNNGQVLVMSLWDDHTANMLWLDSTYPTDSTKTGASRGPCAVSSGVPKDVESQYGDATVIYSDIKFGAINSTFKWN

SEQ ID NO: 120 - protein, 448 aa, Cryptocercus punctulatus
MILALLSLAKSLGIATNQAETHPKLTWTRYQSKGSGQTVNGEIVLDSNWRWTHHSGTNCYDGNTWSTSLCPDPTTCSNNCDLDGADYPGTYGISTSGNSLKLGFVTHGSYSTNIGSRVYLLRDSKNYEMFKLKNKEFTFTVDDSKLPCGLNGALYFVAMDEDGGVSKNSINKAGAQYGTGYCDAQCPHDMKFINGEANVLDWKPQSNDENSGNGRYGACCTEMDIWEANSMATAYTPHVCTVTGLRRCEGTECGDTDANQRYNGICDKDGCDFNSYRLGDKTFFGVGKTVDSSKPVTVVTQFVTSNGQDSGTLSEIRRKYVQGGKVIENSKVNIAGITAGNSVTDTFCNEQKKAFGDNNDFEKKGGLGALSKQLDAGMVLVLSLWDDHSVNMLWLDSTYPTNAAAGALGTERGACATSSGAPSDVESQSPDATVTFSDIKFGPIDSTY

SEQ ID NO: 121 - protein, 446 aa, Hodotermopsis sjoestedti
MLVIALILRGLSVGTGTQQSETHPSLSWQQTSKGGSGQSVSGSVVLDSNWRWTHTTDGTTNCYDGNEWSSDLCPDASTCSSNCVLEGADYSGTYGITGSGSSLKLGFVTKGSYSTNIGSRVYLLGDESHYKLFKLENNEFTFTVDDSNLECGLNGALYFVAMDEDGGASKYSGAKPGAKYGMGYCDAQCPHDMKFINGDANVEGWKPSDNDENAGTGKWGACCTEMDIWEANKYATAYTPHICTKNGEYRCEGTDCGDTKDNNRYGGVCDKDGCDFNSWRMGNQSFWGPGLIIDTGKPVTVVTQFLADGGSLSEIRRKYVQGGKVIENTVTKISGMDEFDSITDEFCNQQKKAFRDTNDFEKKGGLKGLGTAVDAGVVLVLSLWDDHDVNMLWLDSIYPTDSGSKAGADRGPCATSSGVPKDVESNYASASVTFSDIKFGPIDSTY

SEQ ID NO: 122 - protein, 448 aa, Cryptocercus punctulatus
MLLALFAFGKSLGIATNQAENHPKLTWTRYQSKGSGQTVNGEIVLDSNWRWTHHSGTNCYDGNTWSTSLCPDPTTCSNNCDLDGADYPGTYGISSSGNSLKLGFVTHGSYSTNIGSRVYLLRDSKNYEMFKLKNKEFTFTVDDSKLPCGLNGALYFVAMDEDGGVSKNSINKAGAQYGTGYCDAQCPHDMKFINGEANVLDWKPQSNDENSGNGRYGACCTEMDIWEANSMATAYTPHVCTVTGIRRCEGTECGDTDANQRYNGICDKDGCDFNSYRLGDKSFFGVGKTVDSSKPVTVVTQFVTSNGQDSGTLSEIRRKYVQGGKVIENSKVNIAGMAAGNSITDTFCNEQKKAFGDNNDFEKKGGLGALSKQLDSGMVLVLSLWDDHSVNMLWLDSTYPTNAAAGALGTERGACATSSGAPSDVESQSPDATVTFSDIKFGPIDSTY

SEQ ID NO: 123 - protein, 451 aa, Reticulitermes speratus
MLASVVYLVSLVVSLEIGTQQSEEHPKLTWQNGSSSVSGSIVLDSNWRWLHDSGTTNCYDGNLWSDDLCPNADTCSSKCYIEGADYSGTYGITSSGSKVTLKFVTKGSYSTNIGSRIYLLKDENTYETFKLKNKEFTFTVDDSKLDCGLNGALYFVAMDADGGKAKYSSFKPGAKYGMGYCDAQCPHDMKFISGKANVDDWKPQDNDENSGDGKLGTCCSEMDIWEGNAKSQAYTVHACSKSGQYECTGQQCGDTDSGDRFKGTCDKDGCDYASWRWGDQSFYGEGKTVDTKSPVTVVTQFIGDPLTEIRRVYVQGGKTINNSKTSNLADTYDSITDKFCDATKDATGDTNDFKAKGAMAGFSTNLNTAQVLVSVHCGMIIQPICCGLIRRIQRIQQKQVQAVDRVLCRRVFQRMLKASMVMLQSRTRTLSLELSTRPLVGISPAGRLFFF

SEQ ID NO: 124 - protein, 448 aa, Cryptocercus punctulatus
MILALLVLGKSLGIATNQAETHPKLTWTRYQSKGSGSTVNGEIVLDSNWRWTHHSGTNCYDGNTWSTSLCPDPTTCSNNCDLDGADYPGTYGISTSGNSLKLGFVTHGSYSTNIGSRVYLLKDTKSYEMFKLKNKEFTFTVDDSKLPCGLNGALYFVAMDEDGGVSKNSINKAGAQYGTGYCDAQCPHDMKFINGEANVLDWKPQSNDENSGNGRYGACCTEMDIWEANSMATAYTPHVCTVTGLRRCEGTECGDTDNDQRYNGICDKDGCDFNSYRLGDKSFFGVGKTVDSSKPVTVVTQFVTSNGQDSGTLSEIRRKYVQGGKVIENSKVNVAGITAGNSVTDTFCNEQKKAFGDNNDFEKKGGLGALSKQLDAGMVLVLSLWDDHSVNMLWLDSTYPTNAAAGALGTERGACATSSGKPSDVESQSPDATVTFSDIKFGPIDSTY

SEQ ID NO: 125 - protein, 439 aa, Mastotermes darwiniensis
MLCIGLISFVYSLGVGTNTAETHPKLTWKNGGQTVNGEVTVDSNWRWTHTKGSTKNCYDGNLWSKDLCPDAATCGKNCVLEGADYSGTYGVTSSGNALTLKFVTHGSYSTNVGSRLYLLKDEKTYQMFNLNGKEFTFTVDVSNLPCGLNGALYHVNMDEDGGTKRYPDNEAGAKYGTGYCDAQCPTDLKFINGIPNSDGWKPQSNDKNSGNGKYGSCCSEMDIWEANSICSAVTPHVCDNLQQTRCQGTACGENGGGSRFGSSCDPDGCDFNSWRMGNKTFYGPGLIVDTKSKFTVVTQFVGNPVTEIKRKYVQNGKVIENSYSNIEGMDKFNSVSDKFCTAQKKAFGDTDSFTKHGGFKQLGSALAKGMVLVLSLWDDHTVNMLWLDSVYPTNSKKAGSDRGPCPTTSGVPADVESKSADANVIYSDIRFGAIDSTYK

SEQ ID NO: 126 - protein, 442 aa, Neotermes koshunensis
MLGALVALASCIGVGTNTPEKHPDLKWTNGGSSVSGSIVVDSNWRWTHIKGETKNCYDGNLWSDKYCPDAATCGKNCVLEGADYSGTYGVTTSGDAATLKFVTHGQYSTNVGSRLYLLKDEKTYQMFNLVGKEFTFTVDVSNLPCGLNGALYFVQMDSDGGMAKYPDNQAGAKYGTGYCDAQCPTDLKFINGIPNSDGWKPQKNDKNSGNGKYGSCCSEMDIWEANSMATAYTPHVCDKLEQTRCSGSACGQNGGGDRFSSSCDPDGCDFNSWRMGNKTFWGPGLIVDTKKPVQVVTQFVGSGGSVTEIKRKYVQGGKVIDNSMTNIAAMSKQYNSVSDEFCQAQKKAFGDNDSFTKHGGFRQLGATLSKGHVLVLSLWDDHDVNMLWLDSVYPTNSNKPGADRGPCKTSSGVPSDVESQNADSTVKYSDIRFGAIDSTYSK

SEQ ID NO: 127 - protein, 445 aa, Neotermes koshunensis
MLAAALFTFACSVGVGTKTTETHPKLNWQQCACKGSCSQVSGEVTMDSNWRWTHDGNGKNCYDGNTWISSLCPDDKTCSDKCVLDGAEYQATYGIQSNGTALTPKFVTHGSYSTNIGSRLYLLKDKSTYYVFQLNNKEFTFSVDVSKLPCGLNGALYFVEMDADGGKSKYAGAKPGAEYGLGYCDAQCPSDLKFINGEANSEGWKPQSGDKNAGNGKYGSCCSEMDVWESNSMATALTPHVCKTTGQTRCSGKSECGGQDGQDRFAGNCDEDGCDFNNWRMGDKTFFGPGLTVDTKSPFVVVTQFYGSPVTEIRRKYVQNGKVIENAKSNIPGIDATNAISDTFCEQQKKAFGDTNDFKNKGGFTKLGSVFSRGMVLVLSLWDDHQVAMLWLDSTYPTNKDKSVPGVDRGPCPTSSGKPDDVESASGDATVVYGNIKFGALDSTY

SEQ ID NO: 128 - protein, 437 aa, Reticulitermes speratus
MFGFLLSLFALQFALEIGTQTSESHPSITWELNGARQSGQIVIDSNWRWLHDSGTTNCYDGNTWSSDLCPDPEKCSQNCYLEGADYSGTYGISASGSQLTLGFVTKGSYSTNIGSRVYLLKDENTYPMFKLKNKEFTFTVDVSNLPCGLNGALYFVAMPSDGGKAKYPLAKPGAKYGMGYCDAQCPHDMKFINGEANVLDWKPQSNDENAGTGRYGTCCTEMDIWEANSQATAYTVHACSKNARCEGTECGDDSASQRYNGICDKDGCDFNSWRWGNKTFFGPGLTVDSSKPVTVVTQFIGDPLTEIRRIWVQGGKVIQNSFTNVSGITSVDSITNTFCDESKVATGDTNDFKAKGGMSGFSKALDTEVVLVLSLWDDHTANMLWLDSTYPTDSTAIGASRGPCATSSGDPKDVESASANASVKFSDIKFGALDSTY

SEQ ID NO: 129 - protein, 447 aa, Cryptocercus punctulatus
MLASLLPLSNSLGTASNQAETHPKLTWTQYTGKGAGQTVNGEIVLDSNWRWTHKDGTNCYDGNTWSSSLCPDPTTCSNNCNLDGADYPGTYGITTSGNQLKLGFVTHGSYSTNIGSRVYLLRDSKNYQMFKLKNKEFTFTVDDSKLPCGLNGAVYFVAMDEDGGTAKHSINKAGAQYGTGYCDAQCPHDMKFINGEANVLDWKPQSNDENSGNGRWGARCTEMDIWEANSRATAYTPHICTKTGLYRCEGTECGDSDTNRYGGVCDKDGCDFNSYRMGDKSFFGQGKTVDSSKPVTVVTQFITDNNQDSGKLTEIRRKYVQGGKVIDNSKVNIAGITAGNPITDTFCDEAKKAFGDNNDFEKKGGLSALGTQLEAGFVLVLSLWDDHSVNMLWLDSTYPTNASPGALGVERGDCAITSGVPADVESQSADASVTFSDIKFGPIDSTY

SEQ ID NO: 130 - protein, 439 aa, Mastotermes darwiniensis
MLCIGLISFVYSLGVGTNTAETHPKLTWKNGGQTVNGEVTVDSNWRWTHTKGSTKNCYDGNLWSKDLCPDAATCGKNCVLEGADYSGTYGVTSSGNALTLKFVTHGSYSTNVGSRLYLLKDEKTYQMFNLNGKEFTFTVDVSNLPCGLSGALYHVNMDEDGGTKRYPDNEAGAKYGTGYCDAQCPTDLKFINGIPNSDGWKPQSNDKNSGNGKYGSCCSEMDIWEANSICSAVTPHVCDNLQQTRCQGAACGENGGGSRFGSSCDPDGCDFNSWGMGNKTFYGPGLIVDTKSKFTVVTQFVGNPVTEIKRKYVQNGKVIENSYSNIEGMDKFNSVSDKFCTAQKKAFGDTDSFTKHGGFKQLGSALAKGMVLVLSLWDDHTVNMLWLDSVYPTNSKKAGSDRGPCPTTSGVPADVESKSADANVIYSDIRFGAIDSTYK

SEQ ID NO: 131 - protein, 448 aa, Cryptocercus punctulatus
MILALLVLGKSLGIATNQAETHPKLTWTRYQSKGSGSTVNGEIVLDSNWRWTHHSGTNCYDGNTWSTSLCPDPTTCSNNCDLDGADYPGTYGISTSGNSLKLGFVTHGSYSTNIGSRVYLLRDSKNYEMFKLKNKEFTFTVDDSKLPCGLNGALYFVAMDEDGGVSKNSINKAGAQYGTGYCDAQCPHDMKFINGEANVLDWKPQSNDENSGNGRYGACCTEMDIWEANSMATAYTPHVCTVTGLRRCEGTECGDTDNDQRYNGICDKDGCDFNSYRLGDKSFFGVGKTVDSSKPVTVVTQFVTSNGQDSGILSETRRKYVQGGKVIENSKVNVAGITAGNSVTDTFCNEQKKAFGDNNDFEKKGGLGALSKQLDAGMVLVLSLWDDHSVNMLWLDSTYPTNAAAGALGTERGACATSSGKPSDVESQSPDATVTFSDIKFGPIDSTY

SEQ ID NO: 132 - protein, 449 aa, Hodotermopsis sjoestedti
MIGIVLIQTVFGIGVGTQQSESHPSLSWQQCSKGGSCTSVSGSIVLDSNWRWTHIPDGTTNCYDGNEWSSDLCPDPTTCSNNCVLEGADYSGTYGISTSGSSAKLGFVTKGSYSTNIGSRVYLLGDESHYKIFDLKNKEFTFTVDDSNLECGLNGALYFVAMDEDGGASRFTLAKPGAKYGTGYCDAQCPHDIKFINGEANVQDWKPSDNDDNAGTGHYGACCTEMDIWEANKYATAYTPHICTENGEYRCEGKSCGDSSDDRYGGVCDKDGCDFNSWRLGNQSFWGPGLIIDTGKPVTVVTQFVTKDGTDSGALSEIRRKYVQGGKTIENTVVKISGIDEVDSITDEFCNQQKQAFGDTNDFEKKGGLSGLGKAFDYGVVLVLSLWDDHDVNMLWLDSVYPTNPAGKAGADRGPCATSSGDPKEVEDKYASASVTFSDIKFGPIDSTY

SEQ ID NO: 133 - protein, 439 aa, Mastotermes darwiniensis
MLVFGIVSFVYSIGVGTNTAETHPKLTWKNGGSTTNGEVTVDSNWRWTHTKGSTKNCYDGNLWSKDLCPDAATCGKNCVLEGADYSGTYGVTSSGDALTLKFVTHGSYSTNVGSRLYLLKDEKTYQMFNLNGKEFTFTVDVSQLPCGLNGALYFVCMDQDGGMSRYPDNQAGAKYGTGYCDAQCPTDLKFINGLPNSDGWKPQSNDKNSGNGKYGSCCSEMDIWEANSLATAVTPHVCDQVGQTRCEGRACGENGGGDRFGSICDPDGCDFNSWRMGNKTFWGPGLIIDTKKPVTVVTQFIGSPVTEIKREYVQGGKVIENSYTNIEGMDKFNSISDKFCTAQKKAFGDNDSFTKHGGFSKLGQSFTKGQVLVLSLWDDHTVNMLWLDSVYPTNSKKLGSDRGPCPTSSGVPADVESKNADSSVKYSDIRFGSIDSTYK

SEQ ID NO: 134 - protein, 451 aa, Reticulitermes speratus
MLSFVFLLGFGVSLEIGTQQSENHPTLSWQQCTSSGSCTSQSGSIVLDSNWRWVHDSGTTNCYDGNEWSSDLCPDPETCSKNCYLDGADYSGTYGITSNGSSLKLGFVTEGSYSTNIGSRVYLKKDTNTYQIFKLKNHEFTFTVDVSNLPCGLNGALYFVEMEADGGKGKYPLAKPGAQYGMGYCDAQCPHDMKFINGNANVLDWKPQETDENSGNGRYGTCCTEMDIWEANSQATAYTPHICTKDGQYQCEGTECGDSDANQRYNGVCDKDGCDFNSYRLGNKTFFGPGLIVDSKKPVTVVTQFITSNGQDSGDLTEIRRIYVQGGKTIQNSFTNIAGLTSVDSITEAFCDESKDLFGDTNDFKAKGGFTAMGKSLDTGVVLVLSLWDDHSVNMLWLDSTYPTDAAAGALGTQRGPCATSSGAPSDVESQSPDASVTFSDIKFGPLDSTY

SEQ ID NO: 135 - protein, 439 aa, Reticulitermes speratus
MLTLVVYLLSLVVSLEIGTQQSESHPALTWQREGSSASGSIVLDSNWRWVHDSGTTNCYDGNEWSTDLCPSSDTCTQKCYIEGADYSGTYGITTSGSKLTLKFVTKGSYSTNIGSRVYLLKDENTYETFKLKNKEFTFTVDDSKLDCGLNGALYFVAMDADGGKQKYSSFKPGAKYGMGYCDAQCPHDMKFISGKANVEDWKPQDNDENSGNGKLGTCCSEMDIWEGNAKSQAYTVHACTKSGQYECTGTDCGDSDSRYQGTCDKDGCDYASYRWGDHSFYGEGKTVDTKQPITVVTQFIGDPLTEIRRLYIQGGKVINNSKTQNLASVYDSITDAFCDATKAASGDTNDFKAKGAMAGFSKNLDTPQVLVLSLWDDHTANMLWLDSTYPTDSRDATAERGPCATSSGVPKDVESNQADASVVFSDIKFGAINSTYSYN

SEQ ID NO: 136 - protein, 437 aa, Reticulitermes speratus
MFGFLLSLFALQFALEIGTQTSESHPSITWELNGARQSGQIVIDSNWRWLHDSGTTNCYDGNTWSSDLCPDPEKCSQNCYLEGADYSGTYGISASGSQLTLGFVTKGSYSTNIGSRVYLLKDENTYQMFKLKNKEFTFTVDVSNLPCGLNGALYFVAMPSDGGKAKYPLAKPGAKYGMGYCDAQCPHDMKFINGEANVLDWKPQSNDENAGTGRYGTCCTEMDIWEANSQATAYTVHACSKNARCEGTECGDDSASQRYNGICDKDGCDFNSWRWGNKTFFGPGLTVDSSKPVTVVTQFIGDPLTEIRRIWVQGGKVIQNSFTNVSGITSVDSITNTFCDESKVATGDTNDFKAKGGMSGFSKALDTEVVLVLSLWDDHTANMLWLDSTYPSNSTAIGATRGPCATSSGDPKNVESASANASVKFSDIKFGAFDSTY

SEQ ID NO: 137 - protein, 438 aa, Reticulitermes speratus
MLALVYFLLSLVVSLEIGTQQSEDHPKLTWQNGSSSVSGSIVLDSNWRWVHDSGTTNCYDGNLWSTDLCPSSDTCTSKCYIEGADYSGTYGITSSGSKVTLKFVTKGSYSTNIGSRIYLLKDENTYETFKLKNKEFTFTVDDSQLNCGLNGALYFVAMDADGGKAKYSSFKPGAKYGMGYCDAQCPHDMKFISGKANVDDWKPQDNDENSGNGKLGTCCSEMDIWEGNAKSQAYTVHACTKSGQYECTGQQCGDTDSGDRFKGTCDKDGCDYASWRWGDQSFYGEGKTVDTKQPVTVVTQFIGDPLTEIRRLYVQGGKTINNSKTSNLADTYDSITDKFCDATKEASGDTNDFKAKGAMSGFSTNLNTAQVLVLSLWDDHTANMLWLDSTYPTDSTKTGASRGPCAVTSGVPKDVESQYGSAQVVYSDIKFGAINSTY

SEQ ID NO: 138 - protein, 441 aa, Reticulitermes speratus
MLALVYFLLSFVVSLEIGTQQSEDHPKLTWQNGSSSVSGSIVLDSNWRWVHDSGTTNCYDGNLWSTDLCGSSDTCSSKCYIEGADYSGTYGISASGSKLTLKFVTKGSYSTNIGSRVYLLKDENTYETFKLKGKEFTFTVDDSKLDCGLNGALYFVAMDADGGKAKYSSFKPGAKYGMGYCDAQCPHDMKFISGKANVDDWKPQDNDENSGNGKLGTCCSEMDIWEGNAKSQAYTVHACTKSGQYECTGQQCGDTDSGDRFKGTCDKDGCDYASWRWGDQSFYGEGKTIDTKQPVTVVTQFIGDPLTEIRRVYVQGGKVINNSKTSNLANVYDSITDKFCDDTKDATGDTNDFKAKGAMSGFSTNLNTAQVLVMSLWDDHTANMLWLDSTYPTDSTKTGASRGPCAVLSGVPKNVESQHGDATVIYSDIKFGAINSTFSYN

SEQ ID NO: 139 - protein, 448 aa, Cryptocercus punctulatus
MFLALFVLGKSLGIATNQAENHPKLTWTRYQSKGSGQTVNGEVVLDSNWRWTHHSGTNCYDGNTWSTSLCPDPQTCSSNCDLDGADYPGTYGISSSGNSLKLGFVTHGSYSTNIGSRVYLLRDSKNYEMFKLKNKEFTFTVDDSKLPCGLNGALYFVAMEEDGGVAKNSINKAGAQYGTGYCDAQCPHDMKFINGEANVLDWKPQSNDENSGNGRYGACCIEMDIWEANSMATAYTPHVCTVTGIHRCEGTECGDTDANQRYNGICDKDGCDFNSYRMGDKSFFGVGKTVDSSKPVTVVTQFVTSNGQDGGTLSEIKRKYVQGGKVIENSKVNIAGITAVNSITDTFCNEQKKAFGDNNDFEKKGGLGALSKQLDLGMVLVLSLWDDHSVNMLWLDSTYPTDAAAGALGTERGACATSSGKPSDVESQSPDASVTFSDIKFGPIDSTY

SEQ ID NO: 140 - protein, 441 aa, Neotermes koshunensis
MLLCLLSIANSLGVGTNTAENHPKLSWKNGGSSVSGSVTVDANWRWTHIKGETKNCYDGNLWSDKYCPDAATCGKNCVIEGADYQGTYGVSSSGDGLTLTFVTHGQYSTNVGSRLYLMKDEKTYQMFNLNGKEFTFTVDVSNLPCGLNGALYFVQMDSDGGMAKYPDNQAGAKYGTGYCDAQCPTDLKFINGIPNSDGWKPQKNDKNSGNGKYGSCCSEMDIWEANSQATAYTPHVCDKLEQTRCSGSSCGHTGGGERFSSSCDPDGCDFNSWRMGNKTFWGPGLIVDTKKPVQVVTQFVGSGNSCTEIKRKYVQGGKVIDNSMSNIAGMSKQYNSVSDDFCQAQKKAFGDNDSFTKHGGFRQLGATLGKGHVLVLSLWDDHDVNMLWLDSVYPTNSNKPGSDRGPCKTSSGIPADVESQAASSSVKYSDIRFGAIDSTYK

SEQ ID NO: 141 - protein, 439 aa, Mastotermes darwiniensis
MLCIGLISFVYSLGVGTNTAETHPKLTWKNGGQTVNGEVTVDSNWRWTHTKGSTKNCYDGNLWSKDLCPDAATCGKNCVLEGADYSGTYGVTSSGNALTLKFVTHGSYSTNVGSRLYLMKDEKTYQMFNLNGKEFTFTVDVSNLPCGLNGALYHVNMDEDGGTKRYPDNEAGAKYGTGYCDAQCPTDLKFINGIPNSDGWKPQSNDKNSGNGKYGSCCSEMDIWEANSICSAVTPHVCDTLQQTRCQGTACGENGGGSRFGSSCDPDGCDFNSWRMGNKTFYGPGLIVDTKSKFTVVTQFVGSPVTEIKRKYVQNGKVIENSFSNIEGMDKFNSISDKFCTAQKKAFGDTDSFTKHGGFKQLGSALAKGMVLVLSLWDDHTVNMLWLDSVYPTNSKKAGSDRGPCPTTSGVPADVESKSANANVIYSDIRFGAIDSTYK

SEQ ID NO: 142 - protein, 441 aa, Neotermes koshunensis
MLLCLLGIASSLDAGTNTAENHPQLSWKNGGSSVSGSVTVDANWRWTHIKGETKNCYDGNLWSDKYCPDAATCGQNCVIEGADYQGTYGVSASGNALTLTFVTHGQYSTNVGSRLYLLKDEKTYQIFNLIGKEFTFTVDVSNLPCGLNGALYFVQMDADGGTAKYSDNKAGAKYGTGYCDAQCPTDLKFINGIPNSDGWKPQKNDKNSGNGRYGSCCSEMDVWEANSLATAYTPHVCDKLEQVRCDGRACGQNGGGDRFSSSCDPDGCDFNSWRLGNKTFWGPGLIVDTKQPVQVVTQWVGSGTSVTEIKRKYVQGGKVIDNSFTKLDSLTKQYNSVSDEFCVAQKKAFGDNDSFTKHGGFRQLGATLAKGHVLVLSLWDDHDVNMLWLDSVYPTNSNKPGADRGPCKTSSGVPADVESQAASSSVKYSDIRFGAIDSTYK

SEQ ID NO: 143 - protein, 439 aa, Mastotermes darwiniensis
MLGIGFVCIVYSLGVGTNTAENHPKLTWKNSGSTTNGEVTVDSNWRWTHTKGTTKNCYDGNLWSKDLCPDAATCGKNCVLEGADYSGTYGVTSSGDALTLKFVTHGSYSTNVGSRLYLLKDEKTYQIFNLNGKEFTFTVDVSNLPCGLNGALYFVNMDADGGTGRYPDNQAGAKYGTGYCDAQCPTDLKFINGIPNSDGWKPQSNDKNSGNGKYGSCCSEMDIWEANSLATAVTPHVCDQVGQTRCEGRACGENGGGDRFGSSCDPDGCDFNSWRLGNKTFWGPGLIVDTKKPVTVVTQFVGSPVTEIKRKYVQGGKVIENSYTNIEGLDKFNSISDKFCTAQKKAFGDNDSFIKHGGFRQLGQSFTKGQVLVLSLWDDHTVNMLWLDSVYPTNSKKPGADRGPCPTSSGVPADVESKNAGSSVKYSDIRFGSIDSTYK

SEQ ID NO: 144 - protein, 438 aa, Reticulitermes speratus
MATLVGILVSLFALEVALEIGTQTSESHPSLSWELNGQRQTGSIVIDSNWRWLHDSGTTNCYDGNEWSSDLCPDPEKCSQNCYLEGADYSGTYGISSSGNSLQLGFVTKGSYSTNIGSRVYLLKDENTYATFKLKNKEFTFTADVSNLPCGLNGALYFVAMPADGGKSKYPLAKPGAKYGMGYCDAQCPHDMKFINGEANILDWKPSSNDENAGAGRYGTCCTEMDIWEANSQATAYTVHACSKNARCEGTECGDDDGRYNGICDKDGCDFNSWRWGNKTFFGPNLIVDSSKPVTVVTQFIGDPLTEIRRIYVQGGKVIQNSFTNISGVASVDSITDAFCNENKVATGDTNDFKAKGGMSGFSKALDTEVVLVLSLWDDHTANMLWLDSTYPTDSSALGASRGPCAITSGEPKDVESASANASVKFSDIKFGAIDSTY

SEQ ID NO: 145 - protein, 441 aa, Reticulitermes speratus
MLTLVYFLLSLVVSLEIGTQQSESHPQLSWQNGSSSVSGSIVLDSNWRWVHDSGTTNCYDGNLWSTDLCPSSDTCTSKCYIEGADYSGTYGITSSGSKLTLKFVTKGSYSTNIGSRVYLLKDENTYETFKLKNKEFTFTVDDSKLDCGLNGALYFVAMDADGGKAKYSSFKPGAKYGMGYCDAQCPHDMKFISGKANVDDWKPQDNDENSGNGKLGTCCSEMDIWEGNAKSQAYTVHACTKSGQYECTGQQCGDTDSGDRFKGTCDKDGCDYASWRWGDQSFYGEGKTVDTKQPLTVVTQFVGDPLTEIRRVYVQGGKTINNSKTSNLADTYDSITDKFCDATKEASGDTNDFKAKGAMSGFSTNLNTAQVLVMSLWDDHTANMLWLDSTYPTDSTKTGASRGPCAVSSGVPKDVESQHGDATVIYSDIKFGAINSTFKWN

SEQ ID NO: 146 - protein, 446 aa, Hodotermopsis sjoestedti
MLSLVSIFLVGLGFSLGVGTQQSESHPSLSWQNCSAKGSCQSVSGSIVLDSNWRWLHDSGTTNCYDGNEWSTDLCPDASTCDKNCYIEGADYSGTYGITSSGAQLKLGFVTKGSYSTNIGSRVYLLRDESHYQLFKLKNHEFTFTVDDSQLPCGLNGALYFVEMAEDGGAKPGAQYGMGYCDAQCPHDMKFITGEANVKDWKPQETDENAGNGHYGACCTEMDIWEANSQATAYTPHICSKTGIYRCEGTECGDNDANQRYNGVCDKDGCDFNSYRLGNKTFWGPGLTVDSNKAMIVVTQFTTSNNQDSGELSEIRRIYVQGGKTIQNSDTNVQGITTTNKITQAFCDETKVTFGDTNDFKAKGGFSGLSKSLESGAVLVLSLWDDHSVNMLWLDSTYPTDSAGKPGADRGPCAITSGDPKDVESQSPNASVTFSDIKFGPIDSTY

SEQ ID NO: 147 - protein, 448 aa, Cryptocercus punctulatus
MILALLVLGKSLGIATNQAETHPKLTWTRYQSKGSGSTVNGEIVLDSNWRWTHHSGTNCYDGNTWSTSLCPDPTTCSNNCDLDGADYPGTYGISTSGNSLKLGFVTHGSYSTNIGSRVYLLKDTKSYEMFKLKNKEFTFTVDDSKLPCGLNGALYFVAMDEDGGVSKNSINKAGAQYGTGYCDAQCPHDMKFINGEANVLDWKPQSNDENSGNGRYGACCTEMDIWEANSMATAYTPHVCTVTGLRRCEGTECGDTDNDQRYNGICDKDGCDFNSYRLGDKSFFGVGKTVDSSKPVTVVTQFVTSNGQDSGTLSEIRRKYVQGGKVIENSKVNVAGITAGNSVTDTFCNEQKKAFGDNNDFEKKGGFGALSKQLVAGMVLVLSLWDDHSVNMLWLDSTYPTNAAAGALGTERGACATSSGKPSDVESQSPDATVTFSDIKFGPIDSTY

SEQ ID NO: 148 - protein, 445 aa, Mastotermes darwiniensis
MLCVGLFGLVYSIGVGTNTQETHPKLSWKQCSSGGSCTTQQGSVVIDSNWRWTHSTKDLTNCYDGNLWDSTLCPDGTTCSKNCVLEGADYSGTYGITSSGDSLTLKFVTHGSYSTNVGSRLYLLKDDNNYQIFNLAGKEFTFTVDVSNLPCGLNGALYFVEMDQDGGKGKHKENEAGAKYGTGYCDAQCPTDLKFIDGIANSDGWKPQDNDENSGNGKYGSCCSEMDIWEANSLATAYTPHVCDTKGQKRCQGTACGENGGGDRFGSECDPDGCDFNSWRQGNKSFWGPGLIIDTKKSVQVVTQFIGSGSSVTEIRRKYVQNGKVIENSYSTISGTEKYNSISDDYCNAQKKAFGDTNSFENHGGFKRFSQHIQDMVLVLSLWDDHTVNMLWLDSVYPTNSNKPGADRGPCETSSGVPADVESKSASASVKYSDIRFGPIDSTYK

SEQ ID NO: 149 - protein, 441 aa, Neotermes koshunensis
MLLCLWSIAYSLGVGTNTAENHPKLSWKNGGSSVSGSVTVDANWRWTHIKGETKNCYDGNLWSDKYCPDAATCGKNCVIEGADYQGTYGVSASGDGLTLTFVTHGQYSTNVGSRLYLMKDEKTYQIFNLNGKEFTFTVDVSNLPCGLNGALYFVQMDSDGGMAKYPDNQAGAKYGTGYCDAQCPTDLKFINGIPNSDGWKPQKNDKNSGNGKYGSCCSEMDIWEANSQATAYTPHVCDKLEQTRCSGSACGHTGGGERFSSSCDPDGCDFNSWRMGNKTFWGPGLIVDTKKPVQVVTQFVGSGNSCTEIKRKYVQGGKVIDNSMSNIAGMTKQYNSVSDDFCQAQKKAFGDNDSFTKHGGFRQLGATLGKGHVLVLSLWDDHDVNMLWLDSVYPTNSNKPGSDRGPCKTSSGIPADVESQAASSSVKYSDIRFGAIDSTYK

SEQ ID NO: 150 - protein, 33 aa, Unknown
  Obtained from an Environmental Sample
NVEGWTPSSNNANTGLGNHGACCAELDIWEANS

SEQ ID NO: 151 - protein, 33 aa, Trichoderma reesei
NVEGWEPSSNNANTGIGGHGSCCSEMDIWEANS

SEQ ID NO: 152 - protein, 33 aa, Penicillium occitanis
NVEGWTPSANNANTGIGNHGACCAELDIWEANS

SEQ ID NO: 153 - protein, 33 aa, Trichoderma reesei
NVEGWEPSSNNANTGIGGHGSCCSEMDIWQANS

SEQ ID NO: 154 - protein, 33 aa, Aspergillus nidulans
NVEGWESSDTNPNGGVGNHGSCCAEMDIWEANS

SEQ ID NO: 155 - protein, 33 aa, Gibberella zeae
NSDGWQPSDSDVNGGIGNLGTCCPEMDIWEANS

SEQ ID NO: 156 - protein, 33 aa, Aspergillus fumigatus
NVEGWQPSSNDANAGTGNHGSCCAEMDIWEANS

SEQ ID NO: 157 - protein, 33 aa, Aspergillus clavatus
NVEGWTPSSSDANAGNGGHGSCCAEMDIWEANS

SEQ ID NO: 158 - protein, 33 aa, Claviceps purpurea
NSKDWIPSKSDANAGIGSLGACCREMDIWEANN

SEQ ID NO: 159 - protein, 31 aa, Phanerochaete chrysosporium
NVGNWTETGSNTGTGSYGTCCSEMDIWEANN

SEQ ID NO: 160 - protein, 33 aa, Neosartorya fischeri
NVEGWKPSSNDKNAGVGGHGSCCPEMDIWEANS

SEQ ID NO: 161 - protein, 33 aa, Leptosphaeria maculans
NVEGWQPSKNDQNAGVGGHGSCCAEMDIWEANS

SEQ ID NO: 162 - protein, 33 aa, Neurospora crassa
NVEGWTPSTNDANAGIGDHGTCCSEMDIWEANK

SEQ ID NO: 163 - protein, 33 aa, Coprinopsis cinerea okayama
NSADWTPSETDPNAGRGRYGICCAEMDIWEANS

SEQ ID NO: 164 - protein, 33 aa, Botryotinia fuckeliana
NVEGWVPDSNSANSGTGNIGSCCSEFDVWEANS

SEQ ID NO: 165 - protein, 33 aa, Phaeosphaeria nodorum
NADGWQASTSDPNAGVGKKGACCAEMDVWEANS

SEQ ID NO: 166 - protein, 33 aa, Humicola grisea
NIEGWRPSTNDPNAGVGPMGACCAEIDVWESNA

SEQ ID NO: 167 - protein, 33 aa, Humicola grisea
NIEGWTGSTNDPNAGAGRYGTCCSEMDIWEANN

SEQ ID NO: 168 - protein, 33 aa, Chaetomium thermophilum
NIEGWRPSTNDANAGVGPYGACCAEIDVWESNA

SEQ ID NO: 169 - protein, 33 aa, Chaetomium thermophilum
NIENWTPSTNDANAGFGRYGSCCSEMDIWDANN

SEQ ID NO: 170 - protein, 33 aa, Phaeosphaeria nodorum
NVEGWKPSDNDANAGVGGHGSCCAEMDIWEANS

SEQ ID NO: 171 - protein, 33 aa, Coprinopsis cinerea okayama
NSVGWEPSETDSNAGRGRYGICCAEMDIWEANS

SEQ ID NO: 172 - protein, 33 aa, Agaricus bisporus
NSEGWEGSPNDVNAGTGNFGACCGEMDIWEANS

SEQ ID NO: 173 - protein, 33 aa, Phaeosphaeria nodorum
NVEGWNPSDADPNAGSGKIGACCPEMDIWEANS

SEQ ID NO: 174 - protein, 31 aa, Phanerochaete chrysosporium
NVQGWNATSATTGTGSYGSCCTELDIWEANS

SEQ ID NO: 175 - protein, 33 aa, Aspergillus fumigatus
NVEGWEPSSSDKNAGVGGHGSCCPEMDIWEANS

SEQ ID NO: 176 - protein, 31 aa, Phanerochaete chrysosporium
NVEGWNATSANAGTGNYGTCCTEMDIWEANN

SEQ ID NO: 177 - protein, 33 aa, Thermoascus aurantiacus
NVEGWQPSANDPNAGVGNHGSSCAEMDVWEANS

SEQ ID NO: 178 - protein, 33 aa, Humicola grisea var thermoidea; identical to SEQ ID NO: 166

SEQ ID NO: 179 - protein, 33 aa, Trichoderma viride; identical to SEQ ID NO: 151

SEQ ID NO: 180 - protein, 33 aa, Thermoascus aurantiacus
NVEGWQPSANDPNAGVGNHGSCCAEMDVWEANS

SEQ ID NO: 181 - protein, 33 aa, Magnaporthe grisea
NVEGWQPSSGDANSGVGNMGSCCAEMDIWEANS

SEQ ID NO: 182 - protein, 33 aa, Talaromyces emersonii
NVEGWQPSSNNANTGIGDHGSCCAEMDVWEANS

SEQ ID NO: 183 - protein, 32 aa, Aspergillus oryzae
RKGWEPSDSDKNAGVGGHGSCCPQMDIWEANS

SEQ ID NO: 184 - protein, 33 aa, Penicillium chrysogenum
NVEGWEPSSSDVNGGTGNYGSCCAEMDIWEANS

SEQ ID NO: 185 - protein, 33 aa, Podospora anserina
NIEGWNPSTNDVNAGAGRYGTCCSEMDIWEANN

SEQ ID NO: 186 - protein, 33 aa, Pleurotus sp Florida
NVQGWQPSPNDSNAGKGQYGSCCAEMDIWEANS

SEQ ID NO: 187 - protein, 33 aa, Gibberella zeae; identical to SEQ ID NO: 155

SEQ ID NO: 188 - protein, 33 aa, Sclerotinia sclerotiorum
NNEGWVPDSNSANSGTGNIGSCCSEFDVWEANS

SEQ ID NO: 189 - protein, 31 aa, Phanerochaete chrysosporium; identical to SEQ ID NO: 159

SEQ ID NO: 190 - protein, 33 aa, Trichoderma reesei; identical to SEQ ID NO: 151

SEQ ID NO: 191 - protein, 33 aa, Aspergillus terreus
NVEGWEPSANDANAGTGNHGSCCAEMDIWEANS

SEQ ID NO: 192 - protein, 33 aa, Botryotinia fuckeliana
NSVGWTPSSNDVNAGAGQYGSCCSEMDIWEANK

SEQ ID NO: 193 - protein, 33 aa, Volvariella volvacea
NVQGWQPSPNDTNAGTGNYGACCNEMDVWEANS

SEQ ID NO: 194 - protein, 33 aa, Penicillium janthinellum
NVDGWTPSKNDVNSGIGNHGSCCAEMDIWEANS

SEQ ID NO: 195 - protein, 33 aa, Pleurotus sp Florida
NILDWSASATDANAGNGRYGACCAEMDIWEANS

SEQ ID NO: 196 - protein, 33 aa, Aspergillus nidulans
NVEGWEPSDSDANAGVGGMGTCCPEMDIWEANS

SEQ ID NO: 197 - protein, 33 aa, Fusarium poae
NSDGWEPSKSDVNGGIGNLGTCCPEMDIWEANS

SEQ ID NO: 198 - protein, 33 aa, Pleurotus sp Florida
NILDWSGSATDPNAGNGRYGACCAEMDIWEANS

SEQ ID NO: 199 - protein, 33 aa, Trichoderma viride; identical to SEQ ID NO: 151

SEQ ID NO: 200 - protein, 33 aa, Alternaria alternata
NVEGWKPSSNDANAGVGGHGSCCAEMDIWEANS

SEQ ID NO: 201 - protein, 33 aa, Neosartorya fischeri
NVEGWTPSSNNENTGLGNYGSCCAELDIWESNS

SEQ ID NO: 202 - protein, 33 aa, Neurospora crassa
NIEGWTPSTNDANAGVGPYGGCCAEIDVWESNA

SEQ ID NO: 203 - protein, 33 aa, Cryphonectria parasitica
NVEGWTPSTNDANAGVGGLGSCCSEMDVWEANS

SEQ ID NO: 204 - protein, 31 aa, Corticium rolfsii
NLLDWNATSANSGTGSYGSCCPEMDIWEANK

SEQ ID NO: 205 - protein, 33 aa, Magnaporthe grisea
NIEGWQPSSTDSSAGIGAQGACCAEIDIWESNK

SEQ ID NO: 206 - protein, 33 aa, Magnaporthe grisea
NIEGWKPSSNDANAGVGPYGACCAEIDVWESNA

SEQ ID NO: 207 - protein, 33 aa, Fusarium oxysporum
NSEGWKPSDSDVNAGVGNLGTCCPEMDIWEANS

SEQ ID NO: 208 - protein, 33 aa, Aspergillus clavatus
NVEGWKPSDNDKNAGVGGYGSCCPEMDIWEANS

SEQ ID NO: 209 - protein, 33 aa, Penicillium funiculosum
NVEGWTPSTNNSNTGIGNHGSCCAELDIWEANS

SEQ ID NO: 210 - protein, 33 aa, Humicola grisea var thermoidea; identical to SEQ ID NO: 167

SEQ ID NO: 211 - protein, 33 aa, Chaetomium thermophilum
NVGNWTPSTNDANAGFGRYGSCCSEMDVWEANN

SEQ ID NO: 212 - protein, 33 aa, Aspergillus oryzae
NVEGWVSSTNNANTGTGNHGSCCAELDIWESNS

SEQ ID NO: 213 - protein, 33 aa, Gibberella pulicaris
NSDGWQPSKSDVNAGIGNMGTCCPEMDIWEANS

SEQ ID NO: 214 - protein, 33 aa, Volvariella volvacea
NVAGWNGSPNDTNAGTGNWGACCNEMDIWEANS

SEQ ID NO: 215 - protein, 33 aa, Irpex lacteus
NVAGWTGSSSDPNSGTGNYGTCCSEMDIWEANS

SEQ ID NO: 216 - protein, 33 aa, Chaetomium thermophilum var thermophilum
NIENWTPSTNDANAGFGRYGSCCSEMDIWEANN

SEQ ID NO: 217 - protein, 33 aa, Irpex lacteus
NIVDWTASAGDANSGTGSFGTCCQEMDIWEANS

SEQ ID NO: 218 - protein, 31 aa, Phanerochaete chrysosporium; identical to SEQ ID NO: 159

SEQ ID NO: 219 - protein, 33 aa, Melanocarpus albomyces
NIEGWKSSTSDPNAGVGPYGSCCAEIDVWESNA

SEQ ID NO: 220 - protein, 31 aa, Podospora anserina
NVEGWGGADGNSGTGKYGICCAEMDIWEANS

SEQ ID NO: 221 - protein, 33 aa, Cochliobolus carbonum
NVEGWNPSDADPNGGAGKIGACCPEMDIWEANS

SEQ ID NO: 222 - protein, 33 aa, Trichoderma viride; identical to SEQ ID NO: 151

SEQ ID NO: 223 - protein, 33 aa, Aspergillus aculeatus
NIEGWEPSSTDVNAGTGNHGSCCPEMDIWEANS

SEQ ID NO: 224 - protein, 33 aa, Dictyostelium discoideum
NVDGWIPSTNNPNTGYGNLGSCCAEMDLWEANN

SEQ ID NO: 225 - protein, 33 aa, Sclerotinia sclerotiorum
NSVGWTPSSNDVNTGTGQYGSCCSEMDIWEANK

SEQ ID NO: 226 - protein, 31 aa, Chaetomium globosum
NSEGWGGEDGNSGTGKYGTCCAEMDIWEANL

SEQ ID NO: 227 - protein, 33 aa, Aspergillus niger
NCDGWEPSSNNVNTGVGDHGSCCAEMDVWEANS

SEQ ID NO: 228 - protein, 33 aa, Nectria haematococca
NSDEWKPSDSDKNAGVGKYGTCCPEMDIWEANK

SEQ ID NO: 229 - protein, 33 aa, Talaromyces emersonii; identical to SEQ ID NO: 182

SEQ ID NO: 230 - protein, 33 aa, Polyporus arcularius
NVLDWAGSSNDPNAGTGHYGTCCNEMDIWEANS

SEQ ID NO: 231 - protein, 33 aa, Leptosphaeria maculans
NAEGWTKSASDPNSGVGKKGACCAQMDVWEANS

SEQ ID NO: 232 - protein, 31 aa, Phanerochaete chrysosporium; identical to SEQ ID NO: 176

SEQ ID NO: 233 - protein, 33 aa, Penicillium decumbens
NVEGWKPSANDKNAGVGPHGSCCAEMDIWEANS

SEQ ID NO: 234 - protein, 33 aa, Sclerotinia sclerotiorum
NVDGWVPSSNNPNTGVGNYGSCCAEMDIWEANS

SEQ ID NO: 235 - protein, 33 aa, Acremonium thermophilum
NIDGWQPSSNDANAGLGNHGSCCSEMDIWEANK

SEQ ID NO: 236 - protein, 33 aa, Aspergillus nidulans; identical to SEQ ID NO: 196

SEQ ID NO: 237 - protein, 33 aa, Podospora anserine
NIEGWRESSNDENAGVGPYGGCCAEIDVWESNA

SEQ ID NO: 238 - protein, 33 aa, Thermoascus aurantiacus; identical to SEQ ID NO: 180

SEQ ID NO: 239 - protein, 33 aa, Pseudotrichonympha grassii
NVENWKPQTNDENAGNGRYGACCTEMDIWEANK

SEQ ID NO: 240 - protein, 33 aa, Aspergillus terreus
NVEGWTPSDNDKNAGVGGHGSCCPELDIWEANS

SEQ ID NO: 241 - protein, 31 aa, Phanerochaete chrysosporium; identical to SEQ ID NO: 159

SEQ ID NO: 242 - protein, 31 aa, Phanerochaete chrysosporium
NVEGWLGTTATTGTGFFGSCCTDIALWEAND

SEQ ID NO: 243 - protein, 33 aa, Thermoascus aurantiacus; identical to SEQ ID NO: 177

SEQ ID NO: 244 - protein, 33 aa, Acremonium thermophilum
NSASWQPSSNDQNAGVGGMGSCCAEMDIWEANS

SEQ ID NO: 245 - protein, 33 aa, Volvariella volvacea
NVQGWQPSPNDTNAGTGNYGACCNKMDVWEANS

SEQ ID NO: 246 - protein, 33 aa, Chaetomium globosum
NYDGWTPSSNDANAGVGALGGCCAEIDVWESNA

SEQ ID NO: 247 - protein, 33 aa, Irpex lacteus
NVAGWAGSASDPNAGSGTLGTCCSEMDIWEANN

SEQ ID NO: 248 - protein, 33 aa, Lentinula edodes
NVEGWTPSSTSPNAGTGGTGICCNEMDIWEANS

SEQ ID NO: 249 - protein, 33 aa, Pleurotus sp Florida
NVLDWSASATDDNAGNGRYGACCAEMDIWEANS

SEQ ID NO: 250 - protein, 33 aa, Fusarium venenatum
NSDGWQPSKSDVNGGIGNLGTCCPEMDIWEANS

SEQ ID NO: 251 - protein, 31 aa, Phanerochaete chrysosporium; identical to SEQ ID NO: 176

SEQ ID NO: 252 - protein, 33 aa, Fusicoccum sp
NVQNWTASSTDKNAGTGHYGSCCNEMDIWEANS

SEQ ID NO: 253 - protein, 33 aa, Coprinopsis cinerea okayama
NSVGWEPSETDPNAGKGQYGICCAEMDIWEANS

SEQ ID NO: 254 - protein, 33 aa, Trichoderma harzianum
NVEGWEPSSNNANTGVGGHGSCCSEMDIWEANS

SEQ ID NO: 255 - protein, 32 aa, Neurospora crassa
NVEGWTPSTNDANGIGDHGSCCSEMDIWEANK

SEQ ID NO: 256 - protein, 33 aa, Neosartorya fischeri; identical to SEQ ID NO: 156

SEQ ID NO: 257 - protein, 33 aa, Chaetomium thermophilum; identical to SEQ ID NO: 168

SEQ ID NO: 258 - protein, 33 aa, Botryotinia fuckeliana
NVDGWVPSSNNANTGVGNHGSCCAEMDIWEANS

SEQ ID NO: 259 - protein, 33 aa, Pseudotrichonympha grassii; identical to SEQ ID NO: 239

SEQ ID NO: 260 - protein, 33 aa, Irpex lacteus
NVEGWTGSSTDSNSGTGNYGTCCSEMDIWEANS

SEQ ID NO: 261 - protein, 33 aa, Gibberella avenacea
NSDGWKPSDSDINAGIGNMGTCCPEMDIWEANS

SEQ ID NO: 262 - protein, 33 aa, Aspergillus niger; identical to SEQ ID NO: 227

SEQ ID NO: 263 - protein, 33 aa, Aspergillus niger
NVDGWEPSSNNDNTGIGNHGSCCPEMDIWEANK

SEQ ID NO: 264 - protein, 33 aa, Chrysosporium lucknowense
NVENWQSSTNDANAGTGKYGSCCSEMDVWEANN

SEQ ID NO: 265 - protein, 33 aa, Thielavia australiensis
NVEGWESSTNDANAGSGKYGSCCTEMDVWEANN

SEQ ID NO: 266 - protein, 33 aa, Reticulitermes speratus
NVDDWKPQDNDENSGNGKLGTCCSEMDIWEGNM

SEQ ID NO: 267 - protein, 33 aa, Neotermes koshunensis
NSEGWKPQSGDKNAGNGKYGSCCSEMDVWESNS

SEQ ID NO: 268 - protein, 33 aa, Reticulitermes speratus; identical to SEQ ID NO: 266

SEQ ID NO: 269 - protein, 33 aa, Cryptocercus punctulatus
NVLDWKPQSNDENSGNGRYGACCTEMDIWEANS

SEQ ID NO: 270 - protein, 33 aa, Hodotermopsis sjoestedti
NVEGWKPSDNDENAGTGKWGACCTEMDIWEANK

SEQ ID NO: 271 - protein, 33 aa, Cryptocercus punctulatus; identical to SEQ ID NO: 269

SEQ ID NO: 272 - protein, 33 aa, Reticulitermes speratus
NVDDWKPQDNDENSGDGKLGTCCSEMDIWEGNA

SEQ ID NO: 273 - protein, 33 aa, Cryptocercus punctulatus; identical to SEQ ID NO: 269

SEQ ID NO: 274 - protein, 33 aa, Mastotermes darwiniensis
NSDGWKPQSNDKNSGNGKYGSCCSEMDIWEANS

SEQ ID NO: 275 - protein, 33 aa, Neotermes koshunensis
NSDGWKPQKNDKNSGNGKYGSCCSEMDIWEANS

SEQ ID NO: 276 - protein, 33 aa, Neotermes koshunensis; identical to SEQ ID NO: 267

SEQ ID NO: 277 - protein, 33 aa, Reticulitermes speratus
NVLDWKPQSNDENAGTGRYGTCCTEMDIWEANS

SEQ ID NO: 278 - protein, 33 aa, Cryptocercus punctulatus
NVLDWKPQSNDENSGNGRWGARCTEMDIWEANS

SEQ ID NO: 279 - protein, 33 aa, Mastotermes darwiniensis; identical to SEQ ID NO: 274

SEQ ID NO: 280 - protein, 33 aa, Cryptocercus punctulatus; identical to SEQ ID NO: 269

SEQ ID NO: 281 - protein, 33 aa, Hodotermopsis sjoestedti
NVQDWKPSDNDDNAGTGHYGACCTEMDIWEANK

SEQ ID NO: 282 - protein, 33 aa, Mastotermes darwiniensis; identical to SEQ ID NO: 274

SEQ ID NO: 283 - protein, 33 aa, Reticulitermes speratus
NVLDWKPQETDENSGNGRYGTCCTEMDIWEANS

SEQ ID NO: 284 - protein, 33 aa, Reticulitermes speratus
NVEDWKPQDNDENSGNGKLGTCCSEMDIWEGNA

SEQ ID NO: 285 - protein, 33 aa, Reticulitermes speratus; identical to SEQ ID NO: 277

SEQ ID NO: 286 - protein, 33 aa, Reticulitermes speratus
NVDDWKPQDNDENSGNGKLGTCCSEMDIWEGNA

SEQ ID NO: 287 - protein, 33 aa, Reticulitermes speratus; identical to SEQ ID NO: 286

SEQ ID NO: 288 - protein, 33 aa, Cryptocercus punctulatus
NVLDWKPQSNDENSGNGRYGACCIEMDIWEANS

SEQ ID NO: 289 - protein, 33 aa, Neotermes koshunensis; identical to SEQ ID NO: 275

SEQ ID NO: 290 - protein, 33 aa, Mastotermes darwiniensis; identical to SEQ ID NO: 274

SEQ ID NO: 291 - protein, 33 aa, Neotermes koshunensis
NSDGWKPQKNDKNSGNGRYGSCCSEMDVWEANS

SEQ ID NO: 292 - protein, 33 aa, Mastotermes darwiniensis; identical to SEQ ID NO: 274

SEQ ID NO: 293 - protein, 33 aa, Reticulitermes speratus
NILDWKPSSNDENAGAGRYGTCCTEMDIWEANS

SEQ ID NO: 294 - protein, 33 aa, Reticulitermes speratus; identical to SEQ ID NO: 286

SEQ ID NO: 295 - protein, 33 aa, Hodotermopsis sjoestedti
NVKDWKPQETDENAGNGHYGACCTEMDIWEANS

SEQ ID NO: 296 - protein, 33 aa, Cryptocercus punctulatus; identical to SEQ ID NO: 269

SEQ ID NO: 297 - protein, 33 aa, Mastotermes darwiniensis
NSDGWKPQDNDENSGNGKYGSCCSEMDIWEANS

SEQ ID NO: 298 - protein, 33 aa, Neotermes koshunensis; identical to SEQ ID NO: 275

SEQ ID NO: 299 - protein, 497 aa, Trichoderma reesei
QSACTLQSETHPPLTWQKCSSGGTCTQQTGSVVIDANWRWTHATNSSTNCYDGNTWSSTLCPDNETCAKNCCLDGAAYASTYGVTTSGNSLSIGFVTQSAQKNVGARLYLMASDTTYQEFTLLGNEFSFDVDVSQLPCGLNGALYFVSMDADGGVSKYPTNTAGAKYGTGYCDSQCPRDLKFINGQANVEGWEPSSNNANTGIGGHGSCCSEMDIWEANSISEALTPHPCTTVGQEICEGDGCGGTYSDNAYGGTCDPDGCDWNPYRLGNTSFYGPGSSFTLDTTKKLTVVTQFETSGAINRYYVQNGVTFQQPNAELGSYSGNELNDDYCTAEEAEFGGSSFSDKGGLTQFKKATSGGMVLVMSLWDDYYANMLWLDSTYPTNETSSTPGAVRGSCSTSSGVPAQVESQSPNAKVTFSNIKFGPIGSTGNPSGGNPPGGNPPGTTTTRRPATTTGSSPGPTQSHYGQCGGIGYSGPTVCASGTTCQVLNPYYSQCL

SEQ ID NO: 300 - protein, 497 aa, Trichoderma reesei
QSACTLQSETHPPLTWQKCSSGGTCTQQTGSVVIDANWRWTHATNSSTNCYDGNTWSSTLCPDNETCAKNCCLDGAAYASTYGVTTSGNSLSIGFVTQSAQKNVGARLYLMASDTTYQEFTLLGNEFSFDVDVSQLPCGLNGALYFVSMDADGGVSKYPTNTAGAKYGTGYCDSQCPRDLKFINGQANVEGWEPSSNNANTGIGGHGSCCSEMDIWEANSISEALTPHPCTTVGQEICEGDGCGGTYSDNRYGGTCDPDGCDWNPYRLGNTSFYGPGSSFTLDTTKKLTVVTQFETSGAINRYYVQNGVTFQQPNAELGSYSGNELNDDYCTAEEAEFGGSSFSDKGGLTQFKKATSGGMVLVMSLWDDYYANMLWLDSTYPTNETSSTPGAVAGSCSTSSGVPAQVESQSPNAKVTFSNIKFGPIGSTGNPSGGNPPGGNPPGTTTTRRPATTTGSSPGPTQSHYGQCGGIGYSGPTVCASGTTCQVLNPYYSQCL

SEQ ID NO: 301 - protein, 529 aa, Unknown
  Obtained from an Environmental Sample
MSALNSFNMYKSALILGSLLATAGAQQIGTYTAETHPSLSWSTCKSGGSCTTNSGAITLDANWRWVHGVNTSTNCYTGNTWNTAICDTDASCAQDCALDGADYSGTYGITTSGNSLRLNFVTGSNVGSRTYLMADNTHYQIFDLLNQEFTFTVDVSHLPCGLNGALYFVTMDADGGVSKYPNNKAGAQYGVGYCDSQCPRDLKFIAGQANVEGWTPSSNNANTGLGNHGACCAELDIWEANSISEALTPHPCDTPGLSVCTTDACGGTYSSDKYAGTCDPDGCDFNPYRLGVTDFYGSGKTVDTTKPITVVTQFVTDDGTSTGTLSEIRRYYVQNGVVIPQPSSKISGVSGNVINSDFCDAEISTFGETASFSKHGGLAKMGAGMEAGMVLVMSLWDDYSVNMLWLDSTYPTNATGTPGAAKGSCPTTSGDPKTVESQSGSSYVTFSDIRVGPFNSTFSGGSSTGGSSTTTASGTTTTKASSTSTSSTSTGTGVAAHWGQCGGQGWTGPTTCASGTTCTVVNPYYSQCL

SEQ ID NO: 302 - protein, 504 aa, Unknown
  Obtained from an Environmental Sample
QQIGTYTAETHPSLSWSTCKSGGSCTTNSGAITLDANWRWVHGVNTSTNCYTGNTWNTAICDTDASCAQDCALDGADYSGTYGITTSGNSLRLNFVTGSNVGSRTYLMADNTHYQIFDLLNQEFTFTVDVSHLPCGLNGALYFVTMDADGGVSKYPNNKAGAQYGVGYCDSQCPRDLKFIAGQANVEGWTPSSNNANTGLGNHGACCAELDIWEANSISEALTPHPCDTPGLSVCTTDACGGTYSSDKYAGTCDPDGCDFNPYRLGVTDFYGSGKTVDTTKPITVVTQFVTDDGTSTGTLSEIRRYYVQNGVVIPQPSSKISGVSGNVINSDFCDAEISTFGETASFSKHGGLAKMGAGMEAGMVLVMSLWDDYSVNMLWLDSTYPTNATGTPGAAKGSCPTTSGDPKTVESQSGSSYVTFSDIRVGPFNSTFSGGSSTGGSSTTTASGTTTTKASSTSTSSTSTGTGVAAHWGQCGGQGWTGPTTCASGTTCTVVNPYYSQCL

What is claimed is:

1. A polypeptide comprising a variant cellobiohydrolase I (“CBH I”) catalytic domain as compared to a reference CBH I catalytic domain, comprising:
(a) a substitution at the amino acid position corresponding to R268 of T. reesei CBH I (“R268 substitution”);
(b) a substitution at the amino acid position corresponding to R411 of T. reesei CBH I (“R411 substitution”); or
(c) both an R268 substitution and an R411 substitution,
wherein substitution (a), (b) or (c) decreases product inhibition as compared to the reference CBH I catalytic domain.

2. The polypeptide of claim 1, which has a single (R268 or R411) or double (R268 and R411) substitution selected from Table 14.

3. The polypeptide of claim 2, which does not have the same substitutions as one or more of variants 1, 9, 15, 161, 169, 175, 281 and/or 289 of Table 14.

4. The polypeptide of claim 1, towards which the IC₅₀ of cellobiose is at least 2-fold, at least 5-fold, at least 10-fold, at least 15-fold, at least 20-fold, at least 25-fold, at least 50-fold, at least 100-fold, at least 150-fold, at least 200-fold, at least 250-fold, at least 500-fold or at least 700-fold the IC₅₀ of cellobiose towards a reference CBH I which does not have a substitution at the amino acid corresponding to R268 or the amino acid position corresponding to R411.

5. The polypeptide of claim 1, towards which the IC₅₀ of cellobiose is up to 750-fold or up to 1,000-fold the IC₅₀ of cellobiose towards a reference CBH I which does not have a substitution at the amino acid corresponding to R268 or the amino acid position corresponding to R411.

6. The polypeptide of claim 1, towards which the IC₅₀ of cellobiose is at least 0.1 mM, at least 0.5 mM, at least 1 mM, at least 2 mM, at least 3 mM, at least 5 mM, at least 7 mM, at least 10 mM, at least 12 mM, at least 15 mM, at least 20 mM, at least 25 mM or at least 30 mM.

7. The polypeptide of claim 1, which comprises an R268 substitution.

8. The polypeptide of claim 7, wherein the R268 substituent is a histidine or lysine.

9. The polypeptide of claim 7, wherein the R268 substituent is an isoleucine, leucine, valine, phenylalanine, tyrosine, asparagine, serine, threonine, cysteine, or glycine.

10. The polypeptide of claim 7, wherein the R268 substituent is an alanine, tryptophan, aspartate, glutamate, or proline.

11. The polypeptide of claim 7, wherein the R268 substituent is a glutamine or methionine.

12. The polypeptide of claim 7, wherein said R268 substitution results in an IC₅₀ of cellobiose that is at least 2-fold, at least 5-fold, at least 7.5-fold or at least 10-fold the IC₅₀ of cellobiose towards a reference CBH I which does not have said R268 substitution.

13. The polypeptide of claim 7, wherein said R268 substitution results in an IC₅₀ of at least 0.1 mM, at least 0.25 mM, or at least 0.5 mM.

14. The polypeptide of claim 1, which comprises an R411 substitution.

15. The polypeptide of claim 14, wherein the R411 substituent is an alanine, aspartate, serine, cysteine, threonine, glycine or proline.

16. The polypeptide of claim 14, wherein the R411 substituent is a valine, glutamate, histidine, lysine, glutamine, or methionine.

17. The polypeptide of claim 16, wherein the R411 substituent is a valine, histidine, lysine, glutamate, threonine, glycine or methionine.

18. The polypeptide of claim 14, wherein the R411 substituent is a leucine, phenylalanine, tryptophan, tyrosine, or asparagine.

19. The polypeptide of claim 14, wherein the R411 substituent is an isoleucine.

20. The polypeptide of claim 14, wherein said R411 substitution results in an IC₅₀ of cellobiose that is at least 10-fold, at least 15-fold, at least 20-fold, at least 25-fold, at least 50-fold, at least 100-fold or at least 140-fold the IC₅₀ of cellobiose on a reference CBH I which does not have said R411 substitution.

21. The polypeptide of claim 14, wherein said R411 substitution results in an IC₅₀ of at least 1 mM, at least 2 mM, at least 3 mM, at least 4 mM, at least 5 mM, at least 6 mM, at least 7 mM or at least 8 mM.

22. The polypeptide of claim 1, which has R268A substitution and an R411 substitution.

23. The polypeptide of claim 22, wherein the R411 substituent is an alanine, valine, phenylalanine, aspartate, glutamate, lysine, glutamine, serine, threonine, cysteine, glycine, methionine, isoleucine, leucine, tryptophan, histidine, or proline.

24. The polypeptide of claim 22, wherein the R411 substituent is a tyrosine or an asparagine.

25. The polypeptide of claim 1, which has R268 substitution and an R411A substitution.

26. The polypeptide of claim 25, wherein the R268 substituent is an alanine, isoleucine, leucine, valine, phenylalanine, tryptophan, histidine, lysine, glutamine, serine, glycine, methionine, proline, cysteine, aspartate, tyrosine, glutamate, asparagine or threonine.

27. The polypeptide of claim 1, which has at least 0.7-fold the specific activity of a reference CBH I without said R268 or said R411 substitutions.

28. The polypeptide of claim 27, which has up to 4.5-fold the specificity activity of a reference CBH I without said R268 or said R411 substitutions.

29. The polypeptide of claim 28, which has at least 1-fold the specific activity of a reference CBH I without said R268 or said R411 substitutions.

30. The polypeptide of claim 28, which has at least 2-fold the specific activity of a reference CBH I without said R268 or said R411 substitutions.

31. The polypeptide of claim 1, wherein the variant CBH I catalytic domain comprises an amino acid sequence having at least 90% sequence identity to amino acids 18-444 of SEQ ID NO:2.

32. The polypeptide of claim 31, wherein the variant CBH I catalytic domain comprises an amino acid sequence having at least 95% sequence identity to amino acids 18-444 of SEQ ID NO:2.

33. The polypeptide of claim 32, wherein, other than said R268 and/or R411 substitutions, the variant CBH I catalytic domain comprises the sequence of amino acids 18-444 of SEQ ID NO:2.

34. The polypeptide of claim 1, wherein the variant CBH I catalytic domain does not comprise a R268A substitution.

35. The polypeptide of claim 34 whose amino acid sequence does not comprise SEQ ID NO:299.

36. The polypeptide of claim 34 whose amino acid sequence does not consist of SEQ ID NO:299.

37. The polypeptide of claim 1, wherein the variant CBH I catalytic domain does not comprise a R411A substitution.

38. The polypeptide of claim 37 whose amino acid sequence does not comprise SEQ ID NO:301 or SEQ ID NO:300.

39. The polypeptide of claim 37 whose amino acid sequence does not consist of SEQ ID NO:301 or SEQ ID NO:300.

40. A polypeptide comprising an amino acid sequence having at least 95% sequence identity to the amino acid sequence corresponding to positions 18-444 of SEQ ID NO:2, which has an R268K substitution and an R411A substitution as compared to a protein of SEQ ID NO:2.

41. The polypeptide of claim 40 in which said amino acid sequence has at least 97% sequence identity to the amino acid sequence corresponding to positions 18-444 of SEQ ID NO:2.

42. The polypeptide of claim 1, wherein the variant CBH I catalytic domain comprises an amino acid sequence having at least 90% sequence identity to amino acids 26-455 of SEQ ID NO:1.

43. The polypeptide of claim 42, wherein the variant CBH I catalytic domain comprises an amino acid sequence having at least 95% sequence identity to amino acids 26-455 of SEQ ID NO:1.

44. The polypeptide of claim 43, wherein, other than said R268 and/or R411 substitutions, the variant CBH I catalytic domain comprises the sequence of amino acids 26-455 of SEQ ID NO:1.

45. The polypeptide of claim 42, wherein the variant CBH I catalytic domain comprises one of the following amino acid substitutions or pairs of amino acid substitutions as compared to a protein of SEQ ID NO:1:
(a) R273K and R422K;
(b) R273K and R422A;
(c) R273A and R422K;
(d) R273A and R422A;
(e) R273A;
(f) R273K;
(g) R422A; and
(h) R422K.

46. The polypeptide of claim 42, wherein the variant CBH I catalytic domain comprises the amino acid substitutions R273K and R422K as compared to a protein of SEQ ID NO:1.

47. The polypeptide of claim 42, wherein the variant CBH I catalytic domain does not comprise both R273K and R422K substitutions as compared to a protein of SEQ ID NO:1.

48. The polypeptide of claim 47 whose amino acid sequence does not comprise SEQ ID NO:301 or SEQ ID NO:302.

49. The polypeptide of claim 47 whose amino acid sequence does not consist of SEQ ID NO:301 or SEQ ID NO:302.

50. The polypeptide of claim 1, wherein the variant CBH I catalytic domain comprises an amino acid sequence having at least 90%, at least 95% or at least 97% sequence identity of the amino acid sequence of the catalytic domain of any one of SEQ ID NOs:1-149.

51. The polypeptide of claim 1 in which the variant CBH I catalytic domain is operably linked to a cellulose binding domain.

52. The polypeptide of claim 51 in which the catalytic domain is operably linked to a cellulose binding domain via a linker.

53. The polypeptide of claim 51 in which the cellulose binding domain is C-terminal to the catalytic domain.

54. The polypeptide of claim 51 in which the cellulose binding domain is N-terminal to the catalytic domain.

55. The polypeptide of claim 1 which is a mature polypeptide.

56. The polypeptide of claim 55, wherein the mature polypeptide comprises an amino acid sequence having at least 90%, at least 95% or at least 97% sequence identity of mature portion of a polypeptide according to any one of SEQ ID NOs:1-149.

57. The polypeptide of claim 1 which further comprises a signal sequence.

58. The polypeptide of claim 56, which upon expression produces comprises a mature polypeptide comprising an amino acid sequence having at least 90%, at least 95% or at least 97% sequence identity of mature portion of a polypeptide according to any one of SEQ ID NOs:1-149.

59. The polypeptide of claim 1 towards which cellobiose has an IC₅₀ that is at least 2-fold the IC₅₀ of a reference CBH I lacking said R268 substitution and/or R411 substitution.

60. The polypeptide of claim 1 which CBH I activity that is at least 50% the CBH I activity of a reference CBH I lacking said R268 substitution and/or R411 substitution.

61. A composition comprising a polypeptide according to claim 1.

62. The composition of claim 61 in which said polypeptide represents at least 1% of all polypeptides in said composition.

63. The composition of claim 62 in which said polypeptide represents at least 5% of all polypeptide in said composition.

64. The composition of claim 63 in which said polypeptide represents at least 25% of all polypeptide in said composition.

65. The composition of claim 61 which is a whole cellulase.

66. The composition of claim 65, wherein the whole cellulase is produced by a host cell that recombinantly expresses said polypeptide.

67. The composition of claim 61 which is filamentous fungal whole cellulase.

68. A fermentation broth comprising a polypeptide according to claim 1.

69. The fermentation broth of claim 68, which is a filamentous fungal fermentation broth.

70. The fermentation broth of claim 68 which is a cell-free fermentation broth.

71. A method for saccharifying biomass, comprising: treating biomass with a composition according to claim 61 or with a fermentation broth according to claim 68.

72. The method of claim 71, further comprising recovering fermentable sugars.

73. The method of claim 72, wherein the fermentable sugars comprise disaccharides.

74. The method of claim 72, wherein the fermentable sugars comprise monosaccharides.

75. The method of claim 74, wherein monosaccharides are produced by a β-glucosidase in said composition or said fermentation broth.

76. A method for producing a fermentation product, comprising:
(a) treating biomass with a composition according to claim 61 or with a fermentation broth according to claim 68, thereby producing fermentable sugars; and
(b) culturing a fermenting microorganism in the presence of the fermentable sugars produced in step (a) under fermentation conditions, thereby producing a fermentation product.

77. The method of claim 76, wherein said fermentable sugars comprise disaccharides.

78. The method of claim 76, wherein the fermentable sugars comprise monosaccharides.

79. The method of claim 78, wherein monosaccharides are produced by a β-glucosidase in said composition or said fermentation broth.

80. The method of claim 76, wherein the fermentation product is ethanol.

81. The method of claim 76, further comprising, prior to step (a), pretreating the biomass.

82. The method of claim 76, wherein said fermenting microorganism is a bacterium or a yeast.

83. The method of claim 82, wherein said fermenting microorganism is a bacterium selected from Zymomonas mobilis, Escherichia coli and Klebsiella oxytoca.

84. The method of claim 82, wherein said fermenting microorganism is a yeast selected from Saccharomyces cerevisiae, Saccharomyces uvarum, Kluyveromyces fragilis, Kluyveromyces lactis, Candida pseudotropicalis, and Pachysolen tannophilus.

85. The method of claim 76, wherein said biomass is corn stover, bagasses, sorghum, giant reed, elephant grass, miscanthus, Japanese cedar, wheat straw, switchgrass, hardwood pulp, softwood pulp, crushed sugar cane, energy cane, or Napier grass.

86. A nucleic acid comprising a nucleotide sequence encoding the polypeptide of claim 1.

87. A vector comprising the nucleic acid of claim 86.

88. The vector of claim 87 which further comprises an origin of replication.

89. The vector of claim 87 which further comprises a promoter sequence operably linked to said nucleotide sequence.

90. The vector of claim 89, wherein the promoter sequence is operable in yeast.

91. The vector of claim 89, wherein the promoter sequence is operable in filamentous fungi.

92. A recombinant cell engineered to express the nucleic acid of claim 86.

93. The recombinant cell of claim 92 which is a eukaryotic cell.

94. The recombinant cell of claim 93 which is a filamentous fungal cell.

95. The recombinant cell of claim 94, wherein the filamentous fungal cell is of the genus Aspergillus, Penicillium, Rhizopus, Chrysosporium, Myceliophthora, Trichoderma, Humicola, Acremonium or Fusarium.

96. The recombinant cell of claim 94, wherein the filamentous fungal cell is of the species Aspergillus niger, Aspergillus oryzae, Trichoderma reesei, Penicillium chrysogenum, Myceliophthora thermophila, or Rhizopus oryzae.

97. The recombinant cell of claim 93 which is a yeast cell.

98. The recombinant cell of claim 97 which is a yeast cell of the genus Saccharomyces, Kluyveromyces, Candida, Pichia, Schizosaccharomyces, Hansenula, Klockera, Schwanniomyces or Yarrowia.

99. The recombinant cell of claim 98, wherein the yeast cell is of the species S. cerevisiae, S. bulderi, S. barnetti, S. exiguus, S. uvarum, S. diastaticus, K. lactis, K. marxianus or K. fragilis.

100. The recombinant cell of claim 99, which is a S. cerevisiae cell.

101. A host cell transformed with the vector of claim 87.

102. The host cell of claim 101 which is a prokaryotic cell.

103. The host cell of claim 102 which is a bacterial cell.

104. The host cell of claim 101 which is a eukaryotic cell.

105. A method of producing a polypeptide according to claim 1, comprising culturing a recombinant cell engineered to express said polypeptide under conditions in which the polypeptide is expressed.

106. The method of claim 105, wherein the polypeptide comprises a signal sequence and wherein the recombinant cell is cultured under conditions in which the polypeptide is secreted from the recombinant cell.

107. The method of claim 106, further comprising recovering the polypeptide from the cell culture.

108. The method of claim 107, wherein recovering the polypeptide comprises a step of centrifuging away cells and/or cellular debris.

109. The method of claim 107, wherein recovering the polypeptide comprises a step of filtering away cells and/or cellular debris.

110. A method for generating a product tolerant variant CBH I polypeptide, comprising
(a) modifying the nucleotide sequence of a CBH I-encoding nucleic acid so that the nucleic acid encodes a variant CBH I polypeptide, wherein said variant CBH I polypeptide comprises:
(i) an R268 substitution;
(ii) an R411 substitution; or
(iii) both an R268 substitution and an R411 substitution; and
(b) expressing said variant CBH I polypeptide,
thereby generating a product tolerant variant CBH I polypeptide.

111. A method for generating a nucleic acid that encodes a product tolerant variant CBH I polypeptide, comprising modifying the nucleotide sequence of a CBH I-encoding nucleic acid so that the nucleic acid encodes a variant CBH I polypeptide, wherein said variant CBH I polypeptide comprises:
(i) an R268 substitution;
(ii) an R411 substitution; or
(iii) both an R268 substitution and an R411 substitution,
thereby generating a nucleic acid that encodes a product tolerant variant CBH I polypeptide.

112. The method of claim 110 or claim 111, wherein the modification is by site directed mutagenesis.

113. The method of claim 110 or claim 111, wherein variant CBH I polypeptide comprises an R268 substitution.

114. The method of claim 113, wherein the R268 substituent is not an alanine.

115. The method of claim 113, wherein the R268 substituent is a lysine.

116. The method of claim 113, wherein the R268 substituent is an alanine.

117. The method of claim 110 or claim 111, which comprises an R411 substitution.

118. The method of claim 117, wherein the R411 substituent is not an alanine

119. The method of claim 117, wherein the R411 substituent is a lysine.

120. The method of claim 117, wherein the R411 substituent is an alanine.
